United States Patent Application Publication US 2021/0107993 A1 - sequence listing, part 4

SEQ ID NO: 15625 - protein, 425 aa, Homo Sapiens
MSSILPFTPPIVKRLLGWKKGEQNGQEEKWCEKAVKSLVKKLKKTGQLDELEKAITTQNVNTKCITIPRSLDGRLQVSHRKGLPHVIYCRLWRWPDLHSHHELRAMELCEFAFNMKKDEVCVNPYHYQRVETPVLPPVLVPRHTEIPAEFPPLDDYSHSIPENTNFPAGIEPQSNIPETPPPGYLSEDGETSDHQMNHSMDAGSPNLSPNPMSPAHNNLDLQPVTYCEPAFWCSISYYELNQRVGETFHASQPSMTVDGFTDPSNSERFCLGLLSNVNRNAAVELTRRHIGRGVRLYYIGGEVFAECLSDSAIFVQSPNCNQRYGWHPATVCKIPPGCNLKIFNNQEFAALLAQSVNQGFEAVYQLTRMCTIRMSFVKGWGAEYRRQTVTSTPCWIELHLNGPLQWLDKVLTQMGSPSIRCSSVS

SEQ ID NO: 15626 - protein, 552 aa, Homo Sapiens
MDNMSITNTPTSNDACLSIVHSLMCHRQGGESETFAKRAIESLVKKLKEKKDELDSLITAITTNGAHPSKCVTIQRTLDGRLQVAGRKGFPHVIYARLWRWPDLHKNELKHVKYCQYAFDLKCDSVCVNPYHYERVVSPGIDLSGLTLQSNAPSSMMVKDEYVHDFEGQPSLSTEGHSIQTIQHPPSNRASTETYSTPALLAPSESNATSTANFPNIPVASTSQPASILGGSHSEGLLQIASGPQPGQQQNGFTGQPATYHHNSTTTWTGSRTAPYTPNLPHHQNGHLQHHPPMPPHPGHYWPVHNELAFQPPISNHPAPEYWCSIAYFEMDVQVGETFKVPSSCPIVTVDGYVDPSGGDRFCLGQLSNVHRTEAIERARLHIGKGVQLECKGEGDVWVRCLSDHAVFVQSYYLDREAGRAPGDAVHKIYPSAYIKVFDLRQCHRQMQQQAATAQAAAAAQAAAVAGNIPGPGSVGGIAPAISLSAAAGIGVDDLRRLCILRMSFVKGWGPDYPRQSIKETPCWIEIHLHRALQLLDEVLHTMPIADPQPLD

SEQ ID NO: 15627 - protein, 465 aa, Homo Sapiens
MTSMASLFSFTSPAVKRLLGWKQGDEEEKWAEKAVDALVKKLKKKKGAMEELEKALSSPGQPSKCVTIPRSLDGRLQVSHRKGLPHVIYCRVWRWPDLQSHHELKPLDICEFPFGSKQKEVCINPYHYKRVESPVLPPVLVPRHNEFNPQHSLLVQFRNLSHNEPHMPQNATFPDSFHQPNNTPFPLSPNSPYPPSPASSTYPNSPASSGPGSPFQLPADTPPPAYMPPDDQMGQDNSQPMDTSNNMIPQIMPSISSRDVQPVAYEEPKHWCSIVYYELNNRVGEAFHASSTSVLVDGFTDPSNNKSRFCLGLLSNVNRNSTIENTRRHIGKGVHLYYVGGEVYAECLSDSSIFVQSRNCNFHHGFHPTTVCKIPSSCSLKIFNNQEFAQLLAQSVNHGFEAVYELTKMCTIRMSFVKGWGAEYHRQDVTSTPCWIEIHLHGPLQWLDKVLTQMGSPLNPISSVS

SEQ ID NO: 15628 - protein, 496 aa, Homo Sapiens
MFRSKRSGLVRRLWRSRVVPDREEGGSGGGGGGDEDGSLGSRAEPAPRAREGGGCGRSEVRPVAPRRPRDAVGQRGAQGAGRRRRAGGPPRPMSEPGAGAGSSLLDVAEPGGPGWLPESDCETVTCCLFSERDAAGAPRDASDPLAGAALEPAGGGRSREARSRLLLLEQELKTVTYSLLKRLKERSLDTLLEAVESRGGVPGGCVLVPRADLRLGGQPAPPQLLLGRLFRWPDLQHAVELKPLCGCHSFAAAADGPTVCCNPYHFSRLCGPESPPPPYSRLSPRDEYKPLDLSDSTLSYTETEATNSLITAPGEFSDASMSPDATKPSHWCSVAYWEHRTRVGRLYAVYDQAVSIFYDLPQGSGFCLGQLNLEQRSESVRRTRSKIGFGILLSKEPDGVWAYNRGEHPIFVNSPTLDAPGGRALVVRKVPPGYSIKVFDFERSGLQHAPEPDAADGPYDPNSVRISFAKGWGPCYSRQFITSCPCWLEILLNNPR

SEQ ID NO: 15629 - protein, 426 aa, Homo Sapiens
MFRTKRSALVRRLWRSRAPGGEDEEEGAGGGGGGGELRGEGATDSRAHGAGGGGPGRAGCCLGKAVRGAKGHHHPHPPAAGAGAAGGAEADLKALTHSVLKKLKERQLELLLQAVESRGGTRTACLLLPGRLDCRLGPGAPAGAQPAQPPSSYSLPLLLCKVFRWPDLRHSSEVKRLCCCESYGKINPELVCCNPHHLSRLCELESPPPPYSRYPMDFLKPTADCPDAVPSSAETGGTNYLAPGGLSDSQLLLEPGDRSHWCVVAYWEEKTRVGRLYCVQEPSLDIFYDLPQGNGFCLGQLNSDNKSQLVQKVRSKIGCGIQLTREVDGVWVYNRSSYPIFIKSATLDNPDSRTLLVHKVFPGFSIKAFDYEKAYSLQRPNDHEFMQQPWTGFTVQISFVKGWGQCYTRQFISSCPCWLEVIFNSR

SEQ ID NO: 15630 - protein, 467 aa, Homo Sapiens
MHSTTPISSLFSFTSPAVKRLLGWKQGDEEEKWAEKAVDSLVKKLKKKKGAMDELERALSCPGQPSKCVTIPRSLDGRLQVSHRKGLPHVIYCRVWRWPDLQSHHELKPLECCEFPFGSKQKEVCINPYHYRRVETPVLPPVLVPRHSEYNPQLSLLAKFRSASLHSEPLMPHNATYPDSFQQPPCSALPPSPSHAFSQSPCTASYPHSPGSPSEPESPYQHSVDTPPLPYHATEASETQSGQPVDATADRHVVLSIPNGDFRPVCYEEPQHWCSVAYYELNNRVGETFQASSRSVLIDGFTDPSNNRNRFCLGLLSNVNRNSTIENTRRHIGKGVHLYYVGGEVYAECVSDSSIFVQSRNCNYQHGFHPATVCKIPSGCSLKVFNNQLFAQLLAQSVHHGFEVVYELTKMCTIRMSFVKGWGAEYHRQDVTSTPCWIEIHLHGPLQWLDKVLTQMGSPHNPISSVS

SEQ ID NO: 15631 - protein, 1054 aa, Homo Sapiens
MEQDTAAVAATVAAADATATIVVIEDEQPGPSTSQEEGAAAAATEATAATEKGEKKKEKNVSSFQLKLAAKAPKSEKEMDPEYEEKMKADRAKRFEFLLKQTELFAHFIQPSAQKSPTSPLNMKLGRPRIKKDEKQSLISAGDYRHRRTEQEEDEELLSESRKTSNVCIRFEVSPSYVKGGPLRDYQIRGLNWLISLYENGVNGILADEMGLGKTLQTIALLGYLKHYRNIPGPHMVLVPKSTLHNWMNEFKRWVPSLRVICFVGDKDARAAFIRDEMMPGEWDVCVTSYEMVIKEKSVFKKFHWRYLVIDEAHRIKNEKSKLSEIVREFKSTNRLLLTGTPLQNNLHELWALLNFLLPDVFNSADDFDSWFDTKNCLGDQKLVERLHAVLKPFLLRRIKTDVEKSLPPKKEIKIYLGLSKMQREWYTKILMKDIDVLNSSGKMDKMRLLNILMQLRKCCNHPYLFDGAEPGPPYTTDEHIVSNSGKMVVLDKLLAKLKEQGSRVLIFSQMTRLLDILEDYCMWRGYEYCRLDGQTPHEEREDKFLEVEFLGQREAIEAFNAPNSSKFIFMLSTRAGGLGINLASADVVILYDSDWNPQVDLQAMDRAHRIGQKKPVRVFRLITDNTVEERIVERAEIKLRLDSIVIQQGRLIDQQSNKLAKEEMLQMIRHGATHVFASKESELTDEDITTILERGEKKTAEMNERLQKMGESSLRNFRMDIEQSLYKFEGEDYREKQKLGMVEWIEPPKRERKANYAVDAYFREALRVSEPKIPKAPRPPKQPNVQDFQFFPPRLFELLEKEILYYRKTIGYKVPRNPDIPNPALAQREEQKKIDGAEPLTPEETEEKEKLLTQGFTNWTKRDFNQFIKANEKYGRDDIDNIAREVEGKSPEEVMEYSAVFWERCNELQDIEKIMAQIERGEARIQRRISIKKALDAKIARYKAPFHQLRIQYGTSKGKNYTEEEDRFLICMLHKMGFDRENVYEELRQCVRNAPQFRFDWFIKSRTAMEFQRRCNTLISLIEKENMEIEERERAEKKKRATKTPMVKFSAFS

SEQ ID NO: 15632 - protein, 1590 aa, Homo Sapiens; identical to SEQ ID NO: 12546

SEQ ID NO: 15633 - protein, 1647 aa, Homo Sapiens
MSTPDPPLGGTPRPGPSPGPGPSPGAMLGPSPGPSPGSAHSMMGPSPGPPSAGHPIPTQGPGGYPQDNMHQMHKPMESMHEKGMSDDPRYNQMKGMGMRSGGHAGMGPPPSPMDQHSQGYPSPLGGSEHASSPVPASGPSSGPQMSSGPGGAPLDGADPQALGQQNRGPTPFNQNQLHQLRAQIMAYKMLARGQPLPDHLQMAVQGKRPMPGMQQQMPTLPPPSVSATGPGPGPGPGPGPGPGPAPPNYSRPHGMGGPNMPPPGPSGVPPGMPGQPPGGPPKPWPEGPMANAAAPTSTPQKLIPPQPTGRPSPAPPAVPPAASPVMPPQTQSPGQPAQPAPMVPLHQKQSRITPIQKPRGLDPVEILQEREYRLQARIAHRIQELENLPGSLAGDLRTKATIELKALRLLNFQRQLRQEVVVCMRRDTALETALNAKAYKRSKRQSLREARITEKLEKQQKIEQERKRRQKHQEYLNSILQHAKDFKEYHRSVTGKIQKLTKAVATYHANTEREQKKENERIEKERMRRLMAEDEEGYRKLIDQKKDKRLAYLLQQTDEYVANLTELVRQHKAAQVAKEKKKKKKKKKAENAEGQTPAIGPDGEPLDETSQMSDLPVKVIHVESGKILTGTDAPKAGQLEAWLEMNPGYEVAPRSDSEESGSEEEEEEEEEEQPQAAQPPTLPVEEKKKIPDPDSDDVSEVDARHIIENAKQDVDDEYGVSQALARGLQSYYAVAHAVTERVDKQSALMVNGVLKQYQIKGLEWLVSLYNNNLNGILADEMGLGKTIQTIALITYLMEHKRINGPFLIIVPLSTLSNWAYEFDKWAPSVVKVSYKGSPAARRAFVPQLRSGKFNVLLTTYEYIIKDKHILAKIRWKYMIVDEGHRMKNHHCKLTQVLNTHYVAPRRLLLTGTPLQNKLPELWALLNFLLPTIFKSCSTFEQWFNAPFAMTGEKVDLNEEETILIIRRLHKVLRPFLLRRLKKEVEAQLPEKVEYVIKCDMSALQRVLYRHMQAKGVLLTDGSEKDKKGKGGTKTLMNTIMQLRKICNHPYMFQHIEESFSEHLGFTGGIVQGLDLYRASGKFELLDRILPKLRATNHKVLLFCQMTSLMTIMEDYFAYRGFKYLRLDGTTKAEDRGMLLKTFNEPGSEYFIFLLSTRAGGLGLNLQSADTVIIFDSDWNPHQDLQAQDRAHRIGQQNEVRVLRLCTVNSVEEKILAAAKYKLNVDQKVIQAGMFDQKSSSHERRAFLQAILEHEEQDESRHCSTGSGSASFAHTAPPPAGVNPDLEEPPLKEEDEVPDDETVNQMIARHEEEFDLFMRMDLDRRREEARNPKRKPRLMEEDELPSWIIKDDAEVERLTCEEEEEKMFGRGSRHRKEVDYSDSLTEKQWLKAIEEGTLEEIEEEVRQKKSSRKRKRDSDAGSSTPTTSTRSRDKDDESKKQKKRGRPPAEKLSPNPPNLTKKMKKIVDAVIKYKDSSSGRQLSEVFIQLPSRKELPEYYELIRKPVDFKKIKERIRNHKYRSLNDLEKDVMLLCQNAQTFNLEGSLIYEDSIVLQSVFTSVRQKIEKEDDSEGEESEEEEEGEEEGSESESRSVKVKIKLGRKEKAQDRLKGGRRRPSRGSRAKPVVSDDDSEEEQEEDRSGSGSEED

SEQ ID NO: 15634 - protein, 1052 aa, Homo Sapiens
MSSAAEPPPPPPPESAPSKPAASIASGGSNSSNKGGPEGVAAQAVASAASAGPADAEMEEIFDDASPGKQKEIQEPDPTYEEKMQTDRANRFEYLLKQTELFAHFIQPAAQKTPTSPLKMKPGRPRIKKDEKQNLLSVGDYRHRRTEQEEDEELLTESSKATNVCTRFEDSPSYVKWGKLRDYQVRGLNWLISLYENGINGILADEMGLGKTLQTISLLGYMKHYRNIPGPHMVLVPKSTLHNWMSEFKRWVPTLRSVCLIGDKEQRAAFVRDVLLPGEWDVCVTSYEMLIKEKSVFKKFNWRYLVIDEAHRIKNEKSKLSEIVREFKTTNRLLLTGTPLQNNLHELWSLLNFLLPDVFNSADDFDSWFDTNNCLGDQKLVERLHMVLRPFLLRRIKADVEKSLPPKKEVKIYVGLSKMQREWYTRILMKDIDILNSAGKMDKMRLLNILMQLRKCCNHPYLFDGAEPGPPYTTDMHLVTNSGKMVVLDKLLPKLKEQGSRVLIFSQMTRVLDILEDYCMWRNYEYCRLDGQTPHDERQDSINAYNEPNSTKFVFMLSTRAGGLGINLATADVVILYDSDWNPQVDLQAMDRAHRIGQTKTVRVFRFITDNTVEERIVERAEMKLRLDSIVIQQGRLVDQNLNKIGKDEMLQMIRHGATHVFASKESEITDEDIDGILERGAKKTAEMNEKLSKMGESSLRNFTMDTESSVYNFEGEDYREKQKIAFTEWIEPPKRERKANYAVDAYFREALRVSEPKAPKAPRPPKQPNVQDFQFFPPRLFELLEKEILFYRKTIGYKVPRNPELPNAAQAQKEEQLKIDEAESLNDEELEEKEKLLTQGFTNWNKRDFNQFIKANEKWGRDDIENIAREVEGKTPEEVIEYSAVFWERCNELQDIEKIMAQIERGEARIQRRISIKKALDTKIGRYKAPFHQLRISYGTNKGKNYTEEEDRFLICMLHKLGFDKENVYDELRQCIRNSPQFRFDWFLKSRTAMELQRRCNTLITLIERENMELEEKEKAEKKKRGPKPSTQKRKMDGAPDGRGRKKKLKL

SEQ ID NO: 15635 - protein, 1026 aa, Homo Sapiens
MNLFNLDRFRFEKRNKIEEAPEATPQPSQPGPSSPISLSAEEENAEGEVSRANTPDSDITEKTEDSSVPETPDNERKASISYFKNQRGIQYIDLSSDSEDVVSPNCSNTVQEKTFNKDTVIIVSEPSEDEESQGLPTMARRNDDISELEDLSELEDLKDAKLQTLKELFPQRSDNDLLKLIESTSTMDGAIAAALLMFGDAGGGPRKRKLSSSSEPYEEDEFNDDQSIKKTRLDHGEESNESAESSSNWEKQESIVLKLQKEFPNFDKQELREVLKEHEWMYTEALESLKVFAEDQDMQYVSQSEVPNGKEVSSRSQNYPKNATKTKLKQKFSMKAQNGFNKKRKKNVFNPKRVVEDSEYDSGSDVGSSLDEDYSSGEEVMEDGYKGKILHFLQDASIGELTLIPQCSQKKAQKITELRPFNSWEALFTKMSKTNGLSEDLIWHCKTLIQERDVVIRLMNKCEDISNKLTKQVTMLTGNGGGWNIEQPSILNQSLSLKPYQKVGLNWLALVHKHGLNGILADEMGLGKTIQAIAFLAYLYQEGNNGPHLIVVPASTIDNWLREVNLWCPTLKVLCYYGSQEERKQIRFNIHSRYEDYNVIVTTYNCAISSSDDRSLFRRLKLNYAIFDEGHMLKNMGSIRYQHLMTINANNRLLLTGTPVQNNLLELMSLLNFVMPHMFSSSTSEIRRMFSSKTKSADEQSIYEKERIAHAKQIIKPFILRRVKEEVLKQLPPKKDRIELCAMSEKQEQLYLGLFNRLKKSINNLEKNTEMCNVMMQLRKMANHPLLHRQYYTAEKLKEMSQLMLKEPTHCEANPDLIFEDMEVMTDFELHVLCKQYRHINNFQLDMDLILDSGKFRVLGCILSELKQKGDRVVLFSQFTMMLDILEVLLKHHQHRYLRLDGKTQISERIHLIDEFNTDMDIFVFLLSTKAGGLGINLTSANVVILHDIDCNPYNDKQAEDRCHRVGQTKEVLVIKLISQGTIEESMLKINQQKLKLEQDMTTVDEGDEGSMPADIATLLKTSMGL

SEQ ID NO: 15636 - protein, 954 aa, Homo Sapiens
MSLPLTEEQRKKIEENRQKALARRAEKLLAEQHQRTSSGTSIAGNPFQAKQGPSQNFPRESCKPVSHGVIFKQQNLSSSSNADQRPHDSHSFQAKGIWKKPEEMPTACPGHSPRSQMALTGISPPLAQSPPEVPKQQLLSYELGQGHAQASPEIRFTPFANPTHKPLAKPKSSQETPAHSSGQPPRDAKLEAKTAKASPSGQNISYIHSSSESVTPRTEGRLQQKSGSSVQKGVNSQKGKCVRNGDRFQVLIGYNAELIAVFKTLPSKNYDPDTKTWNFSMNDYSALMKAAQSLPTVNLQPLEWAYGSSESPSTSSEGQAGLPSAPSLSFVKGRCMLISRAYFEADISYSQDLIALFKQMDSRRYDVKTRKWSFLLEEHSKLIAKVRCLPQVQLDPLPTTLTLAFASQLKKTSLSLTPDVPEADLSEVDPKLVSNLMPFQRAGVNFAIAKGGRLLLADDMGLGKTIQAICIAAFYRKEWPLLVVVPSSVRFTWEQAFLRWLPSLSPDCINVVVTGKDRLTAGLINIVSFDLLSKLEKQLKTPFKVVIIDESHFLKNSRTARCRAAMPVLKVAKRVILLSGTPAMSRPAELYTQIIAVKPTFFPQFHAFGLRYCDAKRMPWGWDYSGSSNLGELKLLLEEAVMLRRLKSDVLSQLPAKQRKIVVIAPGRINARTRAALDAAAKEMTTKDKTKQQQKDALILFFNRTAEAKIPSVIEYILDLLESGREKFLVFAHHKVVLDAITQELERKHVQHIRIDGSTSSAEREDLCQQFQLSERHAVAVLSITAANMGLTFSSADLVVFAELFWNPGVLIQAEDRVHRIGQTSSVGIHYLVAKGTADDYLWPLIQEKIKVLAEAGLSETNFSEMTESTDYLYKDPKQQKIYDLFQKSFEKEGSDMELLEAAESFDPGSASGTSGSSSQNMGDTLDESSLTASPQKKRRFEFFDNWDSFTSPL

SEQ ID NO: 15637 - protein, 385 aa, Homo Sapiens
MMMMALSKTFGQKPVKFQLEDDGEFYMIGSEVGNYLRMFRGSLYKRYPSLWRRLATVEERKKIVASSHGKKTKPNTKDHGYTTLATSVTLLKASEVEEILDGNDEKYKAVSISTEPPTYLREQKAKRNSQWVPTLPNSSHHLDAVPCSTTINRNRMGRDKKRTFPLCFDDHDPAVIHENASQPEVLVPIRLDMEIDGQKLRDAFTWNMNEKLMTPEMFSEILCDDLDLNPLTFVPAIASAIRQQIESYPTDSILEDQSDQRVIIKLNIHVGNISLVDQFEWDMSEKENSPEKFALKLCSELGLGGEFVTTIAYSIRGQLSWHQKTYAFSENPLPTVEIAIRNTGDADQWCPLLETLTDAEMEKKIRDQDRNTRRMRRLANTAPAW

SEQ ID NO: 15638 - protein, 1105 aa, Homo Sapiens
MAAAAGGGGPGTAVGATGSGIAAAAAGLAVYRRKDGGPATKFWESPETVSQLDSVRVWLGKHYKKYVHADAPTNKTLAGLVVQLLQFQEDAFGKHVTNPAFTKLPAKCFMDFKAGGALCHILGAAYKYKNEQGWRRFDLQNPSRMDRNVEMFMNIEKTLVQNNCLTRPNIYLIPDIDLKLANKLKDIIKRHQGTFTDEKSKASHHIYPYSSSQDDEEWLRPVMRKEKQVLVHWGFYPDSYDTWVHSNDVDAEIEDPPIPEKPWKVHVKWILDTDIFNEWMNEEDYEVDENRKPVSFRQRISTKNEEPVRSPERRDRKASANARKRKHSPSPPPPTPTESRKKSGKKGQASLYGKRRSQKEEDEQEDLTKDMEDPTPVPNIEEVVLPKNVNLKKDSENTPVKGGTVADLDEQDEETVTAGGKEDEDPAKGDQSRSVDLGEDNVTEQTNHIIIPSYASWFDYNCIHVIERRALPEFFNGKNKSKTPEIYLAYRNFMIDTYRLNPQEYLTSTACRRNLTGDVCAVMRVHAFLEQWGLVNYQVDPESRPMAMGPPPTPHFNVLADTPSGLVPLHLRSPQVPAAQQMLNFPEKNKEKPVDLQNFGLRTDIYSKKTLAKSKGASAGREWTEQETLLLLEALEMYKDDWNKVSEHVGSRTQDECILHFLRLPIEDPYLENSDASLGPLAYQPVPFSQSGNPVMSTVAFLASVVDPRVASAAAKAALEEFSRVREEVPLELVEAHVKKVQEAARASGKVDPTYGLESSCIAGTGPDEPEKLEGAEEEKMEADPDGQQPEKAENKVENETDEGDKAQDGENEKNSEKEQDSEVSEDTKSEEKETEENKELTDTCKERESDTGKKKVEHEISEGNVATAAAAALASAATKAKHLAAVEERKIKSLVALLVETQMKKLEIKLRHFEELETIMDREKEALEQQRQQLLTERQNFHMEQLKYAELRARQQMEQQQHGQNPQQAHQHSGGPGLAPLGAAGHPGMMPHQQPPPYPLMHHQMPPPHPPQPGQIPGPGSMMPGQHMPGRMIPTVAANIHPSGSGPTPPGMPPMPGNILGPRVPLTAPNGMYPPPPQQQPPPPPPADGVPPPPAPGPPASAAP

SEQ ID NO: 15639 - protein, 1214 aa, Homo Sapiens
MAVRKKDGGPNVKYYEAADTVTQFDNVRLWLGKNYKKYIQAEPPTNKSLSSLVVQLLQFQEEVFGKHVSNAPLTKLPIKCFLDFKAGGSLCHILAAAYKFKSDQGWRRYDFQNPSRMDRNVEMFMTIEKSLVQNNCLSRPNIFLCPEIEPKLLGKLKDIIKRHQGTVTEDKNNASHVVYPVPGNLEEEEWVRPVMKRDKQVLLHWGYYPDSYDTWIPASEIEASVEDAPTPEKPRKVHAKWILDTDTFNEWMNEEDYEVNDDKNPVSRRKKISAKTLTDEVNSPDSDRRDKKGGNYKKRKRSPSPSPTPEAKKKNAKKGPSTPYTKSKRGHREEEQEDLTKDMDEPSPVPNVEEVTLPKTVNTKKDSESAPVKGGTMTDLDEQEDESMETTGKDEDENSTGNKGEQTKNPDLHEDNVTEQTHHIIIPSYAAWFDYNSVHAIERRALPEFFNGKNKSKTPEIYLAYRNFMIDTYRLNPQEYLTSTACRRNLAGDVCAIMRVHAFLEQWGLINYQVDAESRPTPMGPPPTSHFHVLADTPSGLVPLQPKTPQQTSASQQMLNFPDKGKEKPTDMQNFGLRTDMYTKKNVPSKSKAAASATREWTEQETLLLLEALEMYKDDWNKVSEHVGSRTQDECILHFLRLPIEDPYLEDSEASLGPLAYQPIPFSQSGNPVMSTVAFLASVVDPRVASAAAKSALEEFSKMKEEVPTALVEAHVRKVEEAAKVTGKADPAFGLESSGIAGTTSDEPERIEESGNDEARVEGQATDEKKEPKEPREGGGAIEEEAKEKTSEAPKKDEEKGKEGDSEKESEKSDGDPIVDPEKEKEPKEGQEEVLKEVVESEGERKTKVERDIGEGNLSTAAAAALAAAAVKAKHLAAVEERKIKSLVALLVETQMKKLEIKLRHFEELETIMDREREALEYQRQQLLADRQAFHMEQLKYAEMRARQQHFQQMHQQQQQPPPALPPGSQPIPPTGAAGPPAVHGLAVAPASVVPAPAGSGAPPGSLGPSEQIGQAGSTAGPQQQQPAGAPQPGAVPPGVPPPGPHGPSPFPNQQTPPSMMPGAVPGSGHPGVAGNAPLGLPFGMPPPPPPPAPSIIPFGSLADSISINLPAPPNLHGHHHHLPFAPGTLPPPNLPVSMANPLHPNLPATTTMPSSLPLGPGLGSAAAQSPAIVAAVQGNLLPSASPLPDPGTPLPPDPTAPSPGTVTPVPPPQ

SEQ ID NO: 15640 - protein, 515 aa, Homo Sapiens
MAARAGFQSVAPSGGAGASGGAGAAAALGPGGTPGPPVRMGPAPGQGLYRSPMPGAAYPRPGMLPGSRMTPQGPSMGPPGYGGNPSVRPGLAQSGMDQSRKRPAPQQIQQVQQQAVQNRNHNAKKKKMADKILPQRIRELVPESQAYMDLLAFERKLDQTIMRKRLDIQEALKRPIKQKRKLRIFISNTFNPAKSDAEDGEGTVASWELRVEGRLLEDSALSKYDATKQKRKFSSFFKSLVIELDKDLYGPDNHLVEWHRTATTQETDGFQVKRPGDVNVRCTVLLMLDYQPPQFKLDPRLARLLGIHTQTRPVIIQALWQYIKTHKLQDPHEREFVICDKYLQQIFESQRMKFSEIPQRLHALLMPPEPIIINHVISVDPNDQKKTACYDIDVEVDDTLKTQMNSFLLSTASQQEIATLDNKIHETIETINQLKTQREFMLSFARDPQGFINDWLQSQCRDLKTMTDVVGNPEEERRAEFYFQPWAQEAVCRYFYSKVQQRRQELEQALGIRNT

SEQ ID NO: 15641 - protein, 531 aa, Homo Sapiens
MSGRGAGGFPLPPLSPGGGAVAAALGAPPPPAGPGMLPGPALRGPGPAGGVGGPGAAAFRPMGPAGPAAQYQRPGMSPGNRMPMAGLQVGPPAGSPFGAAAPLRPGMPPTMMDPFRKRLLVPQAQPPMPAQRRGLKRRKMADKVLPQRIRELVPESQAYMDLLAFERKLDQTIARKRMEIQEAIKKPLTQKRKLRIYISNTFSPSKAEGDSAGTAGTPGGTPAGDKVASWELRVEGKLLDDPSKQKRKFSSFFKSLVIELDKELYGPDNHLVEWHRMPTTQETDGFQVKRPGDLNVKCTLLLMLDHQPPQYKLDPRLARLLGVHTQTRAAIMQALWLYIKHNQLQDGHEREYINCNRYFRQIFSCGRLRFSEIPMKLAGLLQHPDPIVINHVISVDPNDQKKTACYDIDVEVDDPLKAQMSNFLASTTNQQEIASLDVKIHETIESINQLKTQRDFMLSFSTDPQDFIQEWLRSQRRDLKIITDVIGNPEEERRAAFYHQPWAQEAVGRHIFAKVQQRRQELEQVLGIRLT

SEQ ID NO: 15642 - protein, 483 aa, Homo Sapiens
MAADEVAGGARKATKSKLFEFLVHGVRPGMPSGARMPHQGAPMGPPGSPYMGSPAVRPGLAPAGMEPARKRAAPPPGQSQAQSQGQPVPTAPARSRSAKRRKMADKILPQRIRELVPESQAYMDLLAFERKLDQTIMRKRVDIQEALKRPMKQKRKLRLYISNTFNPAKPDAEDSDGSIASWELRVEGKLLDDPSKQKRKFSSFFKSLVIELDKDLYGPDNHLVEWHRTPTTQETDGFQVKRPGDLSVRCTLLLMLDYQPPQFKLDPRLARLLGLHTQSRSAIVQALWQYVKTNRLQDSHDKEYINGDKYFQQIFDCPRLKFSEIPQRLTALLLPPDPIVINHVISVDPSDQKKTACYDIDVEVEEPLKGQMSSFLLSTANQQEISALDSKIHETIESINQLKIQRDFMLSFSRDPKGYVQDLLRSQSRDLKVMTDVAGNPEEERRAEFYHQPWSQEAVSRYFYCKIQQRRQELEQSLVVRNT

SEQ ID NO: 15643 - protein, 411 aa, Homo Sapiens
MSKRPSYAPPPTPAPATQMPSTPGFVGYNPYSHLAYNNYRLGGNPGTNSRVTASSGITIPKPPKPPDKPLMPYMRYSRKVWDQVKASNPDLKLWEIGKIIGGMWRDLTDEEKQEYLNEYEAEKIEYNESMKAYHNSPAYLAYINAKSRAEAALEEESRQRQSRMEKGEPYMSIQPAEDPDDYDDGFSMKHTATARFQRNHRLISEILSESVVPDVRSVVTTARMQVLKRQVQSLMVHQRKLEAELLQIEERHQEKKRKFLESTDSFNNELKRLCGLKVEVDMEKIAAEIAQAEEQARKRQEEREKEAAEQAERSQSSIVPEEEQAANKGEEKKDDENIPMETEETHLEETTESQQNGEEGTSTPEDKESGQEGVDSMAEEGTSDSNTGSESNSATVEEPPTDPIPEDEKKE

SEQ ID NO: 15644 - protein, 264 aa, Homo Sapiens
MPRSFLVRKPSDPNRKPNYSELQDSNPEFTFQQPYDQAHLLAAIPPPEILNPTASLPMLIWDSVLAPQAQPIAWASLRLQESPRVAELTSLSDEDSGKGSQPPSPPSPAPSSFSSTSVSSLEAEAYAAFPGLGQVPKQLAQLSEAKDLQARKAFNCKYCNKEYLSLGALKMHIRSHTLPCVCGTCGKAFSRPWLLQGHVRTHTGEKPFSCPHCSRAFADRSNLRAHLQTHSDVKKYQCQACARTFSRMSLLHKHQESGCSGCPR

SEQ ID NO: 15645 - protein, 268 aa, Homo Sapiens
MPRSFLVKKHFNASKKPNYSELDTHTVIISPYLYESYSMPVIPQPEILSSGAYSPITVWTTAAPFHAQLPNGLSPLSGYSSSLGRVSPPPPSDTSSKDHSGSESPISDEEERLQSKLSDPHAIEAEKFQCNLCNKTYSTFSGLAKHKQLHCDAQSRKSFSCKYCDKEYVSLGALKMHIRTHTLPCVCKICGKAFSRPWLLQGHIRTHTGEKPFSCPHCNRAFADRSNLRAHLQTHSDVKKYQCKNCSKTFSRMSLLHKHEESGCCVAH

SEQ ID NO: 15646 - protein, 292 aa, Homo Sapiens
MPRSFLVKTHSSHRVPNYRRLETQREINGACSACGGLVVPLLPRDKEAPSVPGDLPQPWDRSSAVACISLPLLPRIEEALGASGLDALEVSEVDPRASRAAIVPLKDSLNHLNLPPLLVLPTRWSPTLGPDRHGAPEKLLGAERMPRAPGGFECFHCHKPYHTLAGLARHRQLHCHLQVGRVFTCKYCDKEYTSLGALKMHIRTHTLPCTCKICGKAFSRPWLLQGHVRTHTGEKPYACSHCSRAFADRSNLRAHLQTHSDAKKYRCRRCTKTFSRMSLLARHEESGCCPGP

SEQ ID NO: 15647 - protein, 1469 aa, Homo Sapiens
MDVDAEREKITQEIKELERILDPGSSGSHVEISESSLESDSEADSLPSEDLDPADPPISEEERWGEASNDEDDPKDKTLPEDPETCLQLNMVYQEVIQEKLAEANLLLAQNREQQEELMRDLAGSKGTKVKDGKSLPPSTYMGHFMKPYFKDKVTGVGPPANEDTREKAAQGIKAFEELLVTKWKNWEKALLRKSVVSDRLQRLLQPKLLKLEYLHQKQSKVSSELERQALEKQGREAEKEIQDINQLPEEALLGNRLDSHDWEKISNINFEGSRSAEEIRKFWQNSEHPSINKQEWSREEEERLQAIAAAHGHLEWQKIAEELGTSRSAFQCLQKFQQHNKALKRKEWTEEEDRMLTQLVQEMRVGSHIPYRRIVYYMEGRDSMQLIYRWTKSLDPGLKKGYWAPEEDAKLLQAVAKYGEQDWFKIREEVPGRSDAQCRDRYLRRLHFSLKKGRWNLKEEEQLIELIEKYGVGHWAKIASELPHRSGSQCLSKWKIMMGKKQGLRRRRRRARHSVRWSSTSSSGSSSGSSGGSSSSSSSSSEEDEPEQAQAGEGDRALLSPQYMVPDMDLWVPARQSTSQPWRGGAGAWLGGPAASLSPPKGSSASQGGSKEASTTAAAPGEETSPVQVPARAHGPVPRSAQASHSADTRPAGAEKQALEGGRRLLTVPVETVLRVLRANTAARSCTQKEQLRQPPLPTSSPGVSSGDSVARSHVQWLRHRATQSGQRRWRHALHRRLLNRRLLLAVTPWVGDVVVPCTQASQRPAVVQTQADGLREQLQQARLASTPVFTLFTQLFHIDTAGCLEVVRERKALPPRLPQAGARDPPVHLLQASSSAQSTPGHLFPNVPAQEASKSASHKGSRRLASSRVERTLPQASLLASTGPRPKPKTVSELLQEKRLQEARAREATRGPVVLPSQLLVSSSVILQPPLPHTPHGRPAPGPTVLNVPLSGPGAPAAAKPGTSGSWQEAGTSAKDKRLSTMQALPLAPVFSEAEGTAPAASQAPALGPGQISVSCPESGLGQSQAPAASRKQGLPEAPPFLPAAPSPTPLPVQPLSLTHIGGPHVATSVPLPVTWVLTAQGLLPVPVPAVVSLPRPAGTPGPAGLLATLLPPLTETRAAQGPRAPALSSSWQPPANMNREPEPSCRTDTPAPPTHALSQSPAEADGSVAFVPGEAQVAREIPEPRTSSHADPPEAEPPWSGRLPAFGGVIPATEPRGTPGSPSGTQEPRGPLGLEKLPLRQPGPEKGALDLEKPPLPQPGPEKGALDLGLLSQEGEAATQQWLGGQRGVRVPLLGSRLPYQPPALCSLRALSGLLLHKKALEHKATSLVVGGEAERPAGALQASLGLVRGQLQDNPAYLLLRARFLAAFTLPALLATLAPQGVRTTLSVPSRVGSESEDEDLLSELELADRDGQPGCTTATCPIQGAPDSGKCSASSCLDTSNDPDDLDVLRTRHARHTRKRRRLV

SEQ ID NO: 15648 - protein, 328 aa, Homo Sapiens
MASRCSEPYPEVSRIPTVRGCNGSLSGALSCCEDSARGSGPPKAPTVAEGPSSCLRRNVISERERRKRMSLSCERLRALLPQFDGRREDMASVLEMSVQFLRLASALGPSQEQHAILASSKEMWHSLQEDVLQLTLSSQIQAGVPDPGTGASSGTRTPDVKAFLESPWSLDPASASPEPVPHILASSRQWDPASCTSLGTDKCEALLGLCQVRGGLPPFSEPSSLVPWPPGRSLPKAVRPPLSWPPFSQQQTLPVMSGEALGWLGQAGPLAMGAAPLGEPAKEDPMLAQEAGSALGSDVDDGTSFLLTAGPSSWPGEWGPGFRAGPPA

SEQ ID NO: 15649 - protein, 425 aa, Homo Sapiens
MASSIICQEHCQISGQAKIDILLVGDVTVGYLADTVQKLFANIAEVTITISDTKEAAALLDDCIFNMVLLKVPSSLSAEELEAIKLIRFGKKKNTHSLFVFIIPENFKGCISGHGMDIALTEPLTMEKMSNVVKYWTTCPSNTVKTENATGPEELGLPLQRSYSEHLGYFPTDLFACSESLRNGNGLELNASLSEFEKNKKISLLHSSKEKLRRERIKYCCEQLRTLLPYVKGRKNDAASVLEATVDYVKYIREKISPAVMAQITEALQSNMRFCKKQQTPIELSLPGTVMAQRENSVMSTYSPERGLQFLTNTCWNGCSTPDAESSLDEAVRVPSSSASENAIGDPYKTHISSAALSLNSLHTVRYYSKVTPSYDATAVTNQNISIHLPSAMPPVSKLLPRHCTSGLGQTCTTHPNCLQQFWAY

SEQ ID NO: 15650 - protein, 391 aa, Homo Sapiens
MYSMMMETDLHSPGGAQAPTNLSGPAGAGGGGGGGGGGGGGGGAKANQDRVKRPMNAFMVWSRGQRRKMAQENPKMHNSEISKRLGAEWKVMSEAEKRPFIDEAKRLRALHMKEHPDYKYRPRRKTKTLLKKDKYSLAGGLLAAGAGGGGAAVAMGVGVGVGAAAVGQRLESPGGAAGGGYAHVNGWANGAYPGSVAAAAAAAAMMQEAQLAYGQHPGAGGAHPHAHPAHPHPHHPHAHPHNPQPMHRYDMGALQYSPISNSQGYMSASPSGYGGLPYGAAAAAAAAAGGAHQNSAVAAAAAAAAASSGALGALGSLVKSEPSGSPPAPAHSRAPCPGDLREMISMYLPAGEGGDPAAAAAAAAQSRLHSLPQHYQGAGAGVNGTVPLTHI

SEQ ID NO: 15651 - protein, 466 aa, Homo Sapiens
MAEEQDLSEVELSPVGSEEPRCLSPGSAPSLGPDGGGGGSGLRASPGPGELGKVKKEQQDGEADDDKFPVCIREAVSQVLSGYDWTLVPMPVRVNGASKSKPHVKRPMNAFMVWAQAARRKLADQYPHLHNAELSKTLGKLWRLLNESDKRPFIEEAERLRMQHKKDHPDYKYQPRRRKNGKAAQGEAECPGGEAEQGGTAAIQAHYKSAHLDHRHPGEGSPMSDGNPEHPSGQSHGPPTPPTTPKTELQSGKADPKRDGRSMGEGGKPHIDFGNVDIGEISHEVMSNMETFDVAELDQYLPPNGHPGHVSSYSAAGYGLGSALAVASGHSAWISKPPGVALPTVSPPGVDAKAQVKTETAGPQGPPHYTDQPSTSQIAYTSLSLPHYGSAFPSISRPQFDYSDHQPSGPYYGHSGQASGLYSAFSYMGPSQRPLYTAISDPSPSGPQSHSPTHWEQPVYTTLSRP

SEQ ID NO: 15652 - protein, 441 aa, Homo Sapiens
MVQQAESLEAESNLPREALDTEEGEFMACSPVALDESDPDWCKTASGHIKRPMNAFMVWSKIERRKIMEQSPDMHNAEISKRLGKRWKMLKDSEKIPFIREAERLRLKHMADYPDYKYRPRKKPKMDPSAKPSASQSPEKSAAGGGGGSAGGGAGGAKTSKGSSKKCGKLKAPAAAGAKAGAGKAAQSGDYGGAGDDYVLGSLRVSGSGGGGAGKTVKCVFLDEDDDDDDDDDELQLQIKQEPDEEDEEPPHQQLLQPPGQQPSQLLRRYNVAKVPASPTLSSSAESPEGASLYDEVRAGATSGAGGGSRLYYSFKNITKQHPPPLAQPALSPASSRSVSTSSSSSSGSSSGSSGEDADDLMFDLSLNFSQSAHSASEQQLGGGAAAGNLSLSLVDKDLDSFSEGSLGSHFEFPDYCTPELSEMIAGDWLEANFSDLVFTY

SEQ ID NO: 15653 - protein, 315 aa, Homo Sapiens
MVQQRGARAKRDGGPPPPGPGPAEEGAREPGWCKTPSGHIKRPMNAFMVWSQHERRKIMDQWPDMHNAEISKRLGRRWQLLQDSEKIPFVREAERLRLKHMADYPDYKYRPRKKSKGAPAKARPRPPGGSGGGSRLKPGPQLPGRGGRRAAGGPLGGGAAAPEDDDEDDDEELLEVRLVETPGRELWRMVPAGRAARGQAERAQGPSGEGAAAAAAASPTPSEDEEPEEEEEEAAAAEEGEEETVASGEESLGFLSRLPPGPAGLDCSALDRDPDLQPPSGTSHFEFPDYCTPEVTEMIAGDWRPSSIADLVFTY

SEQ ID NO: 15654 - protein, 622 aa, Homo Sapiens
MSMRSPISAQLALDGVGTMVNCTIKSEEKKEPCHEAPQGSATAAEPQPGDPARASQDSADPQAPAQGNFRGSWDCSSPEGNGSPEPKRPGVSEAASGSQEKLDFNRNLKEVVPAIEKLLSSDWKERFLGRNSMEAKDVKGTQESLAEKELQLLVMIHQLSTLRDQLLTAHSEQKNMAAMLFEKQQQQMELARQQQEQIAKQQQQLIQQQHKINLLQQQIQQVNMPYVMIPAFPPSHQPLPVTPDSQLALPIQPIPCKPVEYPLQLLHSPPAPVVKRPGAMATHHPLQEPSQPLNLTAKPKAPELPNTSSSPSLKMSSCVPRPPSHGGPTRDLQSSPPSLPLGFLGEGDAVTKAIQDARQLLHSHSGALDGSPNTPFRKDLISLDSSPAKERLEDGCVHPLEEAMLSCDMDGSRHFPESRNSSHIKRPMNAFMVWAKDERRKILQAFPDMHNSSISKILGSRWKSMTNQEKQPYYEEQARLSRQHLEKYPDYKYKPRPKRTCIVEGKRLRVGEYKALMRTRRQDARQSYVIPPQAGQVQMSSSDVLYPRAAGMPLAQPLVEHYVPRSLDPNMPVIVNTCSLREEGEGTDDRHSVADGEMYRYSEDEDSEGEEKSDGELVVLTD

SEQ ID NO: 15655 - protein, 240 aa, Homo Sapiens
MSKPSDHIKRPMNAFMVWSRGQRRKMAQENPKMHNSEISKRLGAEWKLLSEAEKRPYIDEAKRLRAQHMKEHPDYKYRPRRKPKNLLKKDRYVFPLPYLGDTDPLKAAGLPVGASDGLLSAPEKARAFLPPASAPYSLLDPAQFSSSAIQKMGEVPHTLATGALPYASTLGYQNGAFGSLSCPSQHTHTHPSPTNPGYVVPCNCTAWSASTLQPPVAYILFPGMTKTGIDPYSSAHATAM

SEQ ID NO: 15656 - protein, 233 aa, Homo Sapiens [sequence omitted]

SEQ ID NO: 15657 - protein, 414 aa, Homo Sapiens [sequence omitted]

SEQ ID NO: 15658 - protein, 384 aa, Homo Sapiens [sequence omitted]

SEQ ID NO: 15659 - protein, 317 aa, Homo Sapiens
MYNMMETELKPPGPQQTSGGGGGNSTAAAAGGNQKNSPDRVKRPMNAFMVWSRGQRRKMAQENPKMHNSEISKRLGAEWKLLSETEKRPFIDEAKRLRALHMKEHPDYKYRPRRKTKTLMKKDKYTLPGGLLAPGGNSMASGVGVGAGLGAGVNQRMDSYAHMNGWSNGSYSMMQDQLGYPQHPGLNAHGAAQMQPMHRYDVSALQYNSMTSSQTYMNGSPTYSMSYSQQGTPGMALGSMGSVVKSEASSSPPVVTSSSHSRAPCQAGDLRDMISMYLPGAEVPEPAAPSRLHMSQHYQSGPVPGTAINGTLPLSHM

SEQ ID NO: 15660 - protein, 276 aa, Homo Sapiens
MSKPVDHVKRPMNAFMVWSRAQRRKMAQENPKMHNSEISKRLGAEWKLLTESEKRPFIDEAKRLRAMHMKEHPDYKYRPRRKPKTLLKKDKFAFPVPYGLGGVADAEHPALKAGAGLHAGAGGGLVPESLLANPEKAAAAAAAAAARVFFPQSAAAAAAAAAAAAAGSPYSLLDLGSKMAEISSSSSGLPYASSLGYPTAGAGAFHGAAAAAAAAAAAAGGHTHSHPSPGNPGYMIPCNCSAWPSPGLQPPLAYILLPGMGKPQLDPYPAAYAAAL

SEQ ID NO: 15661 - protein, 446 aa, Homo Sapiens
MRPVRENSSGARSPRVPADLARSILISLPFPPDSLAHRPPSSAPTESQGLFTVAAPAPGAPSPPATLAHLLPAPAMYSLLETELKNPVGTPTQAAGTGGPAAPGGAGKSSANAAGGANSGGGSSGGASGGGGGTDQDRVKRPMNAFMVWSRGQRRKMALENPKMHNSEISKRLGADWKLLTDAEKRPFIDEAKRLRAVHMKEYPDYKYRPRRKTKTLLKKDKYSLPSGLLPPGAAAAAAAAAAAAAAASSPVGVGQRLDTYTHVNGWANGAYSLVQEQLGYAQPPSMSSPPPPPALPPMHRYDMAGLQYSPMMPPGAQSYMNVAAAAAAASGYGGMAPSATAAAAAAYGQQPATAAAAAAAAAAMSLGPMGSVVKSEPSSPPPAIASHSQRACLGDLRDMISMYLPPGGDAADAASPLPGGRLHGVHQHYQGAGTAVNGTVPLTHI

SEQ ID NO: 15662 - protein, 753 aa, Homo Sapiens [sequence omitted]

SEQ ID NO: 15663 - protein, 474 aa, Homo Sapiens
MVQQTNNAENTEALLAGESSDSGAGLELGIASSPTPGSTASTGGKADDPSWCKTPSGHIKRPMNAFMVWSQIERRKIMEQSPDMHNAEISKRLGKRWKLLKDSDKIPFIREAERLRLKHMADYPDYKYRPRKKVKSGNANSSSSAAASSKPGEKGDKVGGSGGGGHGGGGGGGSSNAGGGGGGASGGGANSKPAQKKSCGSKVAGGAGGGVSKPHAKLILAGGGGGGKAAAAAAASFAAEQAGAAALLPLGAAADHHSLYKARTPSASASASSAASASAALAAPGKHLAEKKVKRVYLFGGLGTSSSPVGGVGAGADPSDPLGLYEEEGAGCSPDAPSLSGRSSAASSPAAGRSPADHRGYASLRAASPAPSSAPSHASSSASSHSSSSSSSGSSSSDDEFEDDLLDLNPSSNFESMSLGSFSSSSALDRDLDFNFEPGSGSHFEFPDYCTPEVSEMISGDWLESSISNLVFTY

SEQ ID NO: 15664 - protein, 763 aa, Homo Sapiens [sequence omitted]

SEQ ID NO: 15665 - protein, 828 aa, Homo Sapiens
MSSKQATSPFACAADGEDAMTQDLTSREKEEGSDQHVASHLPLHPIMHNKPHSEELPTLVSTIQQDADWDSVLSSQQRMESENNKLCSLYSFRNTSTSPHKPDEGSRDREIMTSVTFGTPERRKGSLADVVDTLKQKKLEEMTRTEQEDSSCMEKLLSKDWKEKMERLNTSELLGEIKGTPESLAEKERQLSTMITQLISLREQLLAAHDEQKKLAASQIEKQRQQMDLARQQQEQIARQQQQLLQQQHKINLLQQQIQVQGHMPPLMIPIFPHDQRTLAAAAAAQQGFLFPPGITYKPGDNYPVQFIPSTMAAAAASGLSPLQLQKGHVSHPQINQRLKGLSDRFGRNLDTFEHGGGHSYNHKQIEQLYAAQLASMQVSPGAKMPSTPQPPNTAGTVSPTGIKNEKRGTSPVTQVKDEAAAQPLNLSSRPKTAEPVKSPTSPTQNLFPASKTSPVNLPNKSSIPSPIGGSLGRGSSLDILSSLNSPALFGDQDTVMKAIQEARKMREQIQREQQQQQPHGVDGKLSSINNMGLNSCRNEKERTRFENLGPQLTGKSNEDGKLGPGVIDLTRPEDAEGSKAMNGSAAKLQQYYCWPTGGATVAEARVYRDARGRASSEPHIKRPMNAFMVWAKDERRKILQAFPDMHNSNISKILGSRWKSMSNQEKQPYYEEQARLSKIHLEKYPNYKYKPRPKRTCIVDGKKLRIGEYKQLMRSRRQEMRQFFTVGQQPQIPITTGTGVVYPGAITMATTTPSPQMTSDCSSTSASPEPSLPVIQSTYGMKTDGGSLAGNEMINGEDEMEMYDDYEDDPKSDYSSENEAPEAVSAN

SEQ ID NO: 15666 - protein, 388 aa, Homo Sapiens [sequence omitted]

SEQ ID NO: 15667 - protein, 446 aa, Homo Sapiens [sequence omitted]

SEQ ID NO: 15668 - protein, 509 aa, Homo Sapiens
MNLLDPFMKMTDEQEKGLSGAPSPTMSEDSAGSPCPSGSGSDTENTRPQENTFPKGEPDLKKESEEDKFPVCIREAVSQVLKGYDWTLVPMPVRVNGSSKNKPHVKRPMNAFMVWAQAARRKLADQYPHLHNAELSKTLGKLWRLLNESEKRPFVEEAERLRVQHKKDHPDYKYQPRRRKSVKNGQAEAEEATEQTHISPNAIFKALQADSPHSSSGMSEVHSPGEHSGQSQGPPTPPTTPKTDVQPGKADLKREGRPLPEGGRQPPIDFRDVDIGELSSDVISNIETFDVNEFDQYLPPNGHPGVPATHGQVTYTGSYGISSTAATPASAGHVWMSKQQAPPPPPQQPPQAPPAPQAPPQPQAAPPQQPAAPPQQPQAHTLTTLSSEPGQSQRTHIKTEQLSPSHYSEQQQHSPQQIAYSPFNLPHYSPSYPPITRSQYDYTDHQNSSSYYSHAAGQGTGLYSTFTYMNPAQRPMYTPIADTSGVPSIPQTHSPQHWEQPVYTQLTRP

SEQ ID NO: 15669 - protein, 785 aa, Homo Sapiens
MSDQDHSMDEMTAVVKIEKGVGGNNGGNGNGGGAFSQARSSSTGSSSSTGGGGQESQPSPLALLAATCSRIESPNENSNNSQGPSQSGGTGELDLTATQLSQGANGWQIISSSSGATPTSKEQSGSSTNGSNGSESSKNRTVSGGQYVVAAAPNLQNQQVLTGLPGVMPNIQYQVIPQFQTVDGQQLQFAATGAQVQQDGSGQIQIIPGANQQIITNRGSGGNIIAAMPNLLQQAVPLQGLANNVLSGQTQYVTNVPVALNGNITLLPVNSVSAATLTPSSQAVTISSSGSQESGSQPVTSGTTISSASLVSSQASSSSFFTNANSYSTTTTTSNMGIMNFTTSGSSGTNSQGQTPQRVSGLQGSDALNIQQNQTSGGSLQAGQQKEGEQNQQTQQQQILIQPQLVQGGQALQALQAAPLSGQTFTTQAISQETLQNLQLQAVPNSGPIIIRTPTVGPNGQVSWQTLQLQNLQVQNPQAQTITLAPMQGVSLGQTSSSNTTLTPIASAASIPAGTVTVNAAQLSSMPGLQTINLSALGTSGIQVHPIQGLPLAIANAPGDHGAQLGLHGAGGDGIHDDTAGGEEGENSPDAQPQAGRRTRREACTCPYCKDSEGRGSGDPGKKKQHICHIQGCGKVYGKTSHLRAHLRWHTGERPFMCTWSYCGKRFTRSDELQRHKRTHTGEKKFACPECPKRFMRSDHLSKHIKTHQNKKGGPGVALSVGTLPLDSGAGSEGSGTATPSALITTNMVAMEAICPEGIARLANSGINVMQVADLQSINISGNGF

SEQ ID NO: 15670 - protein, 189 aa, Homo Sapiens; identical to SEQ ID NO: 3950

SEQ ID NO: 15671 - protein, 879 aa, Homo Sapiens
MAGGGGDLSTRRLNECISPVANEMNHLPAHSHDLQRMFTEDQGVDDRLLYDIVFKHFKRNKVEISNAIKKTFPFLEGLRDRDLITNKMFEDSQDSCRNLVPVQRVVYNVLSELEKTFNLPVLEALFSDVNMQEYPDLIHIYKGFENVIHDKLPLQESEEEEREERSGLQLSLEQGTGENSFRSLTWPPSGSPSHAGTTPPENGLSEHPCETEQINAKRKDTTSDKDDSLGSQQTNEQCAQKAEPTESCEQIAVQVNNGDAGREMPCPLPCDEESPEAELHNHGIQINSCSVRLVDIKKEKPFSNSKVECQAQARTHHNQASDIIVISSEDSEGSTDVDEPLEVFISAPRSEPVINNDNPLESNDEKEGQEATCSRPQIVPEPMDFRKLSTFRESFKKRVIGQDHDFSESSEEEAPAEASSGALRSKHGEKAPMTSRSTSTWRIPSRKRRFSSSDFSDLSNGEELQETCSSSLRRGSGSQPQEPENKKCSCVMCFPKGVPRSQEARTESSQASDMMDTMDVENNSTLEKHSGKRRKKRRHRSKVNGLQRGRKKDRPRKHLTLNNKVQKKRWQQRGRKANTRPLKRRRKRGPRIPKDENINFKQSELPVTCGEVKGTLYKERFKQGTSKKCIQSEDKKWFTPREFEIEGDRGASKNWKLSIRCGGYTLKVLMENKFLPEPPSTRKKRILESHNNTLVDPCEEHKKKNPDASVKFSEFLKKCSETWKTIFAKEKGKFEDMAKADKAHYEREMKTYIPPKGEKKKKFKDPNAPKRPPLAFFLFCSEYRPKIKGEHPGLSIDDVVKKLAGMWNNTAAADKQFYEKKAAKLKEKYKKDIAAYRAKGKPNSAKKRVVKAEKSKKKKEEEEDEEDEQEEENEEDDDK

SEQ ID NO: 15672 - protein, 689 aa, Homo Sapiens
MFTMTRAMEEALFQHFMHQKLGIAYAIHKPFPFFEGLLDNSIITKRMYMESLEACRNLIPVSRVVHNILTQLERTFNLSLLVTLFSQINLREYPNLVTIYRSFKRVGASYEWQSRDTPILLEAPTGLAEGSSLHTPLALPPPQPPQPSCSPCAPRVSEPGTSSQQSDEILSESPSPSDPVLPLPALIQEGRSTSVTNDKLTSKMNAEEDSEEMPSLLTSTVQVASDNLIPQIRDKEDPQEMPHSPLGSMPEIRDNSPEPNDPEEPQEVSSTPSDKKGKKRKRCIWSTPKRRHKKKSLPGGTASSRHGIQKKLKRVDQVPQKKDDSTCNSTVETRAQKARTECARKSRSEEIIDGTSEMNEGKRSQKTPSTPRRVTQGAASPGHGIQEKLQVVDKVTQRKDDSTWNSEVMMRVQKARTKCARKSRLKEKKKEKDICSSSKRRFQKNIHRRGKPKSDTVDFHCSKLPVTCGEAKGILYKKKMKHGSSVKCIRNEDGTWLTPNEFEVEGKGRNAKNWKRNIRCEGMTLGELLKRKNSDECEVCCQGGQLLCCGTCPRVFHEDCHIPPVEAKRMLWSCTFCRMKRSSGSQQCHHVSKTLERQMQPQDQLIRDYGEPFQEAMWLDLVKERLITEMYTVAWFVRDMRLMFRNHKTFYKASDFGQVGLDLEAEFEKDLKDVLGFHEANDGGFWTLP

SEQ ID NO: 15673 - protein, 867 aa, Homo Sapiens
MAQQGQQGQMASGDSNLNFRMVAEIQNVEGQNLQEQVCPEPIFRFFRENKVEIASAITRPFPFLMGLRDRSFISEQMYEHFQEAFRNLVPVTRVMYCVLSELEKTFGWSHLEALFSRINLMAYPDLNEIYRSFQNVCYEHSPLQMNNVNDLEDRPRLLPYGKQENSNACHEMDDIAVPQEALSSSPRCEPGFSSESCEQLALPKAGGGDAEDAPSLLPGGGVSCKLAIQIDEGESEEMPKLLPYDTEVLESNGMIDAARTYSTAPGEKQGEEEGRNSPRKRNQDKEKYQESPEGRDKETFDLKTPQVTNEGEPEKGLCLLPGEGEEGSDDCSEMCDGEEPQEASSSLARCGSVSCLSAETFDLKTPQVTNEGEPEKELSLLPGEGEEGSDDCSEMCDGEERQEASSSLARRGSVSSELENHPMNEEGESEELASSLLYDNVPGAEQSAYENEKCSCVMCFSEEVPGSPEARTESDQACGTMDTVDIANNSTLGKPKRKRRKKRGHGWSRMRMRRQENSQQNDNSKADGQVVSSEKKANVNLKDLSKIRGRKRGKPGTRFTQSDRAAQKRVRSRASRKHKDETVDFKAPLLPVTCGGVKGILHKKKLQQGILVKCIQTEDGKWFTPTEFEIKGGHARSKNWRLSVRCGGWPLRWLMENGFLPDPPRIRYRKKKRILKSQNNSSVDPCMRNLDECEVCRDGGELFCCDTCSRVFHEDCHIPPVEAERTPWNCIFCRMKESPGSQQCCQESEVLERQMCPEEQLKCEFLLLKVYCCSESSFFAKIPYYYYIREACQGLKEPMWLDKIKKRLNEHGYPQVEGFVQDMRLIFQNHRASYKYKDFGQMGFRLEAEFEKNFKEVFAIQETNGNN

SEQ ID NO: 15674 - protein, 580 aa, Homo Sapiens
MAGGGSDLSTRGLNGGVSQVANEMNHLPAHSQSLQRLFTEDQDVDEGLVYDTVFKHFKRHKLEISNAIKKTFPFLEGLRDRELITNKMFEDSEDSCRNLVPVQRVVYNVLSELEKTFNLSVLEALFSEVNMQEYPDLIHIYKSFKNAIQDKLSFQESDRKEREERPDIKLSLKQGEVPESPEARKESDQACGKMDTVDIANNSTLGKPKRKRRKKKGHGWSRMGTRTQKNNQQNDNSKADGQLVSSEKKANMNLKDLSKIRGRKRGKPGTHFTQSDRAPQKRVRSRASRKHKDETVDFQAPLLPVTCGGVKGILHKEKLEQGTLAKCIQTEDGKWFTPMEFEIKGGYARSKNWRLSVRCGGWPLRRLMEEGSLPNPPRIYYRNKKRILKSQNNSSVDPCMRNLDECEVCRDGGELFCCDTCSRVFHEDCHIPPVESEKTPWNCIFCRMKESPGSQQCCQESEVLERQMCPEEQLKCEFLLLKVYCCSESSFFAKIPYYYYIREACQGLKEPMWLDKIKKRLNEHGYPQVEGFVQDMRLIFQNHRASYKYKDFGQMGLRLEAEFEKDFKEVFAIQETNGNS

SEQ ID NO: 15675 - protein, 613 aa, Homo Sapiens
MSDPQTSMAATAAVSPSDYLQPAASTTQDSQPSPLALLAATCSKIGPPAVEAAVTPPAPPQPTPRKLVPIKPAPLPLSPGKNSFGILSSKGNILQIQGSQLSASYPGGQLVFAIQNPTMINKGTRSNANIQYQAVPQIQASNSQTIQVQPNLTNQIQIIPGTNQAIITPSPSSHKPVPIKPAPIQKSSTTTTPVQSGANVVKLTGGGGNVTLTLPVNNLVNASDTGAPTQLLTESPPTPLSKTNKKARKKSLPASQPPVAVAEQVETVLIETTADNIIQAGNNLLIVQSPGGGQPAVVQQVQVVPPKAEQQQVVQIPQQALRVVQAASATLPTVPQKPSQNFQIQAAEPTPTQVYIRTPSGEVQTVLVQDSPPATAAATSNTTCSSPASRAPHLSGTSKKHSAAILRKERPLPKIAPAGSIISLNAAQLAAAAQAMQTININGVQVQGVPVTITNTGGQQQLTVQNVSGNNLTISGLSPTQIQLQMEQALAGETQPGEKRRRMACTCPNCKDGEKRSGEQGKKKHVCHIPDCGKTFRKTSLLRAHVRLHTGERPFVCNWFFCGKRFTRSDELQRHARTHTGDKRFECAQCQKRFMRSDHLTKHYKTHLVTKNL

SEQ ID NO: 15676 - protein, 781 aa, Homo Sapiens
MTAPEKPVKQEEMAALDVDSGGGGGGGGGHGEYLQQQQQHGNGAVAAAAAAQDTQPSPLALLAATCSKIGPPSPGDDEEEAAAAAGAPAAAGATGDLASAQLGGAPNRWEVLSATPTTIKDEAGNLVQIPSAATSSGQYVLPLQNLQNQQIFSVAPGSDSSNGTVSSVQYQVIPQIQSADGQQVQIGFTGSSDNGGINQESSQIQIIPGSNQTLLASGTPSANIQNLIPQTGQVQVQGVAIGGSSFPGQTQVVANVPLGLPGNITFVPINSVDLDSLGLSGSSQTMTAGINADGHLINTGQAMDSSDNSERTGERVSPDINETNTDTDLFVPTSSSSQLPVTIDSTGILQQNTNSLTTSSGQVHSSDLQGNYIQSPVSEETQAQNIQVSTAQPVVQHLQLQESQQPTSQAQIVQGITPQTIHGVQASGQNISQQALQNLQLQLNPGTFLIQAQTVTPSGQVTWQTFQVQGVQNLQNLQIQNTAAQQITLTPVQTLTLGQVAAGGAFTSTPVSLSTGQLPNLQTVTVNSIDSAGIQLHPGENADSPADIRIKEEEPDPEEWQLSGDSTLNTNDLTHLRVQVVDEEGDQQHQEGKRLRRVACTCPNCKEGGGRGTNLGKKKQHICHIPGCGKVYGKTSHLRAHLRWHSGERPFVCNWMYCGKRFTRSDELQRHRRTHTGEKKFVCPECSKRFMRSDHLAKHIKTHQNKKGIHSSSTVLASVEAARDDTLITAGGTTLILANIQQGSVSGIGTVNTSATSNQDILTNTEIPLQLVTVSGNETME

SEQ ID NO: 15677 - protein, 784 aa, Homo Sapiens
MSDQKKEEEEEAAAAAAMATEGGKTSEPENNNKKPKTSGSQDSQPSPLALLAATCSKIGTPGENQATGQQQIIIDPSQGLVQLQNQPQQLELVTTQLAGNAWQLVASTPPASKENNVSQPASSSSSSSSSNNGSASPTKTKSGNSSTPGQFQVIQVQNPSGSVQYQVIPQLQTVEGQQIQINPTSSSSLQDLQGQIQLISAGNNQAILTAANRTASGNILAQNLANQTVPVQIRPGVSIPLQLQTLPGTQAQVVTTLPINIGGVTLALPVINNVAAGGGTGQVGQPAATADSGTSNGNQLVSTPTNTTTSASTMPESPSSSTTCTTTASTSLTSSDTLVSSADTGQYASTSASSSERTIEESQTPAATESEAQSSSQLQPNGMQNAQDQSNSLQQVQIVGQPILQQIQIQQPQQQIIQAIPPQSFQLQSGQTIQTIQQQPLQNVQLQAVNPTQVLIRAPTLTPSGQISWQTVQVQNIQSLSNLQVQNAGLSQQLTITPVSSSGGTTLAQIAPVAVAGAPITLNTAQLASVPNLQTVSVANLGAAGVQVQGVPVTITSVAGQQQGQDGVKVQQATIAPVTVAVGGIANATIGAVSPDQLTQVHLQQGQQTSDQEVQPGKRLRRVACSCPNCREGEGRGSNEPGKKKQHICHIEGCGKVYGKTSHLRAHLRWHTGERPFICNWMFCGKRFTRSDELQRHRRTHTGEKRFECPECSKRFMRSDHLSKHVKTHQNKKGGGTALAIVTSGELDSSVTEVLGSPRIVTVAAISQDSNPATPNVSTNMEEF

SEQ ID NO: 15678 - protein, 398 aa, Homo Sapiens
MAAVAVLRNDSLQAFLQDRTPSASPDLGKHSPLALLAATCSRIGQPGAAAPPDFLQVPYDPALGSPSRLFHPWTADMPAHSPGALPPPHPSLGLTPQKTHLQPSFGAAHELPLTPPADPSYPYEFSPVKMLPSSMAALPASCAPAYVPYAAQAALPPGYSNLLPPPPPPPPPPTCRQLSPNPAPDDLPWWSIPQAGAGPGASGVPGSGLSGACAGAPHAPRFPASAAAAAAAAAALQRGLVLGPSDFAQYQSQIAALLQTKAPLAATARRCRRCRCPNCQAAGGAPEAEPGKKKQHVCHVPGCGKVYGKTSHLKAHLRWHTGERPFVCNWLFCGKSFTRSDELQRHLRTHTGEKRFACPECGKRFMRSDHLAKHVKTHQNKKLKVAEAGVKREDARDL

SEQ ID NO: 15679 - protein, 376 aa, Homo Sapiens
MLTAVCGSLGSQHTEAPHASPPRLDLQPLQTYQGHTSPEAGDYPSPLQPGELQSLPLGPEVDFSQGYELPGASSRVTCEDLESDSPLAPGPFSKLLQPDMSHHYESWFRPTHPGAEDGSWWDLHPGTSWMDLPHTQGALTSPGHPGALQAGLGGYVGDHQLCAPPPHPHAHHLLPAAGGQHLLGPPDGAKALEVAAPESQGLDSSLDGAARPKGSRRSVPRSSGQTVCRCPNCLEAERLGAPCGPDGGKKKHLHNCHIPGCGKAYAKTSHLKAHLRWHSGDRPFVCNWLFCGKRFTRSDELQRHLQTHTGTKKFPCAVCSRVFMRSDHLAKHMKTHEGAKEEAAGAASGEGKAGGAVEPPGGKGKREAEGSVAPSN

SEQ ID NO: 15680 - protein, 431 aa, Homo Sapiens
MASSLLEEEVHYGSSPLAMLTAACSKFGGSSPLRDSTTLGKAGTKKPYSVGSDLSASKTMGDAYPAPFTSTNGLLSPAGSPPAPTSGYANDYPPFSHSFPGPTGTQDPGLLVPKGHSSSDCLPSVYTSLDMTHPYGSWYKAGIHAGISPGPGNTPTPWWDMHPGGNWLGGGQGQGDGLQGTLPTGPAQPPLNPQLPTYPSDFAPLNPAPYPAPHLLQPGPQHVLPQDVYKPKAVGNSGQLEGSGGAKPPRGASTGGSGGYGGSGAGRSSCDCPNCQELERLGAAAAGLRKKPIHSCHIPGCGKVYGKASHLKAHLRWHTGERPFVCNWLFCGKRFTRSDELERHVRTHTREKKFTCLLCSKRFTRSDHLSKHQRTHGEPGPGPPPSGPKELGEGRSTGEEEASQTPRPSASPATPEKAPGGSPEQSNLLEI

SEQ ID NO: 15681 - protein, 490 aa, Homo Sapiens
MLAATCNKIGSPSPSPSSLSDSSSSFGKGFHPWKRSSSSSSASCNVVGSSLSSFGVSGASRNGGSSSAAAAAAAAAAAAAALVSDSFSCGGSPGSSAFSLTSSSAAAAAAAAAAAASSSPFANDYSVFQAPGVSGGSGGGGGGGGGGSSAHSQDGSHQPVFISKVHTSVDGLQGIYPRVGMAHPYESWFKPSHPGLGAAGEVGSAGASSWWDVGAGWIDVQNPNSAAALPGSLHPAAGGLQTSLHSPLGGYNSDYSGLSHSAFSSGASSHLLSPAGQHLMDGFKPVLPGSYPDSAPSPLAGAGGSMLSAGPSAPLGGSPRSSARRYSGRATCDCPNCQEAERLGPAGASLRRKGLHSCHIPGCGKVYGKTSHLKAHLRWHTGERPFVCNWLFCGKRFTRSDELQRHLRTHTGEKRFACPVCNKRFMRSDHLSKHVKTHSGGGGGGGSAGSGSGGKKGSDTDSEHSAAGSPPCHSPELLQPPEPGHRNGLE

SEQ ID NO: 15682 - protein, 484 aa, Homo Sapiens
MATSILGEEPRFGTTPLAMLAATCNKIGNTSPLTTLPESSAFAKGGFHPWKRSSSSCNLGSSLSGFAVATGGRGSGGLAGGSGAANSAFCLASTSPTSSAFSSDYGGLFSNSAAAAAAAAGVSPQEAGGQSAFISKVHTTAADGLYPRVGMAHPYESWYKSGFHSTLAAGEVTNGAASSWWDVHSSPGSWLEVQNPAGGLQSSLHSGAPQASLHSQLGTYNPDFSSLTHSAFSSTGLGSSAAAASHLLSTSQHLLAQDGFKPVLPSYSDSSAAVAAAAASAMISGAAAAAAGGSSARSARRYSGRATCDCPNCQEAERLGPAGASLRRKGLHSCHIPGCGKVYGKTSHLKAHLRWHTGERPFVCNWLFCGKRFTRSDELQRHLRTHTGEKRFACPVCNKRFMRSDHLSKHIKTHNGGGGGKKGSDSDTDASNLETPRSESPDLILHDSGVSAARAAAAAAAAAAAAAAAASAGGKEAASGPNDS

SEQ ID NO: 15683 - protein, 335 aa, Homo Sapiens
MGSASPGLSSVSPSHLLLPPDTVSRTGLEKAAAGAVGLERRDWSPSPPATPEQGLSAFYLSYFDMLYPEDSSWAAKAPGASSREEPPEEPEQCPVIDSQAPAGSLDLVPGGLTLEEHSLEQVQSMVVGEVLKDIETACKLLNITADPMDWSPSNVQKWLLWTEHQYRLPPMGKAFQELAGKELCAMSEEQFRQRSPLGGDVLHAHLDIWKSAAWMKERTSPGAIHYCASTSEESWTDSEVDSSCSGQPIHLWQFLKELLLKPHSYGRFIRWLNKEKGIFKIEDSAQVARLWGIRKNRPAMNYDKLSRSIRQYYKKGIIRKPDISQRLVYQFVHPI

SEQ ID NO: 15684 - protein, 270 aa, Homo Sapiens
MLQACKMEGFPLVPPPSEDLVPYDTDLYQRQTHEYYPYLSSDGESHSDHYWDFHPHHVHSEFESFAENNFTELQSVQPPQLQQLYRHMELEQMHVLDTPMVPPHPSLGHQVSYLPRMCLQYPSLSPAQPSSDEEEGERQSPPLEVSDGEADGLEPGPGLLPGETGSKKKIRLYQFLLDLLRSGDMKDSIWWVDKDKGTFQFSSKHKEALAHRWGIQKGNRKKMTYQKMARALRNYGKTGEVKKVKKKLTYQFSGEVLGRGGLAERRHPPH

SEQ ID NO: 15685 - protein, 262 aa, Homo Sapiens
MLALEAAQLDGPHFSCLYPDGVFYDLDSCKHSSYPDSEGAPDSLWDWTVAPPVPATPYEAFDPAAAAFSHPQAAQLCYEPPTYSPAGNLELAPSLEAPGPGLPAYPTENFASQTLVPPAYAPYPSPVLSEEEDLPLDSPALEVSDSESDEALVAGPEGKGSEAGTRKKLRLYQFLLGLLTRGDMRECVWWVEPGAGVFQFSSKHKELLARRWGQQKGNRKRMTYQKLARALRNYAKTGEIRKVKRKLTYQFDSALLPAVRRA

SEQ ID NO: 15686 - protein, 248 aa, Homo Sapiens
MTCVEQDKLGQAFEDAFEVLRQHSTGDLQYSPDYRNYLALINHRPHVKGNSSCYGVLPTEEPVYNWRTVINSAADFYFEGNIHQSLQNITENQLVQPTLLQQKGGKGRKKLRLFEYLHESLYNPEMASCIQWVDKTKGIFQFVSKNKEKLAELWGKRKGNRKTMTYQKMARALRNYGRSGEITKIRRKLTYQFSEAILQRLSPSYFLGKEIFYSQCVQPDQEYLSLNNWNANYNYTYANYHELNHHDC

SEQ ID NO: 15687 - protein, 430 aa, Homo Sapiens
MASSAKSAEMPTISKTVNPTPDPHQEYLDPRITIALFEIGSHSPSSWGSLPFLKNSSHQVTEQQTAQKFNNLLKEIKDILKNMAGFEEKITEAKELFEETNITEDVSAHKENIRGLDKINEMLSTNLPVSLAPEKEDNEKKQEMILETNITEDVSAHKENIRGLDKINEMLSTNLPVSLAPEKEDNEKKQQMIMENQNSENTAQVFARDLVNRLEEKKVLNETQQSQEKAKNRLNVQEETMKIRNNMEQLLQEAEHWSKQHTELSKLIKSYQKSQKDISETLGNNGVGFQTQPNNEVSAKHELEEQVKKLSHDTYSLQLMAALLENECQILQQRVEILKELHHQKQGTLQEKPIQINYKQDKKNQKPSEAKKVEMYKQNKQAMKGTFWKKDRSCRSLDVCLNKKACNTQFNIHVARKALRGKMRSASSLR

SEQ ID NO: 15688 - protein, 1147 aa, Homo Sapiens
MDEPPFSEAALEQALGEPCDLDAALLTDIEDMLQLINNQDSDFPGLFDPPYAGSGAGGTDPASPDTSSPGSLSPPPATLSSSLEAFLSGPQAAPSPLSPPQPAPTPLKMYPSMPAFSPGPGIKEESVPLSILQTPTPQPLPGALLPQSFPAPAPPQFSSTPVLGYPSPPGGFSTGSPPGNTQQPLPGLPLASPPGVPPVSLHTQVQSVVPQQLLTVTAAPTAAPVTTTVTSQIQQVPVLLQPHFIKADSLLLTAMKTDGATVKAAGLSPLVSGTTVQTGPLPTLVSGGTILATVPLVVDAEKLPINRLAAGSKAPASAQSRGEKRTAHNAIEKRYRSSINDKIIELKDLVVGTEAKLNKSAVLRKAIDYIRFLQHSNQKLKQENLSLRTAVHKSKSLKDLVSACGSGGNTDVLMEGVKTEVEDTLTPPPSDAGSPFQSSPLSLGSRGSGSGGSGSDSEPDSPVFEDSKAKPEQRPSLHSRGMLDRSRLALCTLVFLCLSCNPLASLLGARGLPSPSDTTSVYHSPGRNVLGTESRDGPGWAQWLLPPVVWLLNGLLVLVSLVLLFVYGEPVTRPHSGPAVYFWRHRKQADLDLARGDFAQAAQQLWLALRALGRPLPTSHLDLACSLLWNLIRHLLQRLWVGRWLAGRAGGLQQDCALRVDASASARDAALVYHKLHQLHTMGKHTGGHLTATNLALSALNLAECAGDAVSVATLAEIYVAAALRVKTSLPRALHFLTRFFLSSARQACLAQSGSVPPAMQWLCHPVGHRFFVDGDWSVLSTPWESLYSLAGNPVDPLAQVTQLFREHLLERALNCVTQPNPSPGSADGDKEFSDALGYLQLLNSCSDAAGAPAYSFSISSSMATTTGVDPVAKWWASLTAVVIHWLRRDEEAAERLCPLVEHLPRVLQESERPLPRAALHSFKAARALLGCAKAESGPASLTICEKASGYLQDSLATTPASSSIDKAVQLFLCDLLLVVRTSLWRQQQPPAPAPAAQGTSSRPQASALELRGFQRDLSSLRRLAQSFRPAMRRVFLHEATARLMAGASPTRTHQLLDRSLRRRAGPGGKGGAVAELEPRPTRREHAEALLLASCYLPPGFLSAPGQRVGMLAEAARTLEKLGDRRLLHDCQQMLMRLGGGTTVTSS

SEQ ID NO: 15689 - protein, 1141 aa, Homo Sapiens
MDDSGELGGLETMETLTELGDELTLGDIDEMLQFVSNQVGEFPDLFSEQLCSSFPGSGGSGSSSGSSGSSSSSSNGRGSSSGAVDPSVQRSFTQVTLPSFSPSAASPQAPTLQVKVSPTSVPTTPRATPILQPRPQPQPQPQTQLQQQTVMITPTFSTTPQTRIIQQPLIYQNAATSFQVLQPQVQSLVTSSQVQPVTIQQQVQTVQAQRVLTQTANGTLQTLAPATVQTVAAPQVQQVPVLVQPQIIKTDSLVLTTLKTDGSPVMAAVQNPALTALTTPIQTAALQVPTLVGSSGTILTTMPVMMGQEKVPIKQVPGGVKQLEPPKEGERRTTHNIIEKRYRSSINDKIIELKDLVMGTDAKMHKSGVLRKAIDYIKYLQQVNHKLRQENMVLKLANQKNKLLKGIDLGSLVDNEVDLKIEDFNQNVLLMSPPASDSGSQAGFSPYSIDSEPGSPLLDDAKVKDEPDSPPVALGMVDRSRILLCVLTFLCLSFNPLTSLLQWGGAHDSDQHPHSGSGRSVLSFESGSGGWFDWMMPTLLLWLVNGVIVLSVFVKLLVHGEPVIRPHSRSSVTFWRHRKQADLDLARGDFAAAAGNLQTCLAVLGRALPTSRLDLACSLSWNVIRYSLQKLRLVRWLLKKVFQCRRATPATEAGFEDEAKTSARDAALAYHRLHQLHITGKLPAGSACSDVHMALCAVNLAECAEEKIPPSTLVEIHLTAAMGLKTRCGGKLGFLASYFLSRAQSLCGPEHSAVPDSLRWLCHPLGQKFFMERSWSVKSAAKESLYCAQRNPADPIAQVHQAFCKNLLERAIESLVKPQAKKKAGDQEEESCEFSSALEYLKLLHSFVDSVGVMSPPLSRSSVLKSALGPDIICRWWTSAITVAISWLQGDDAAVRSHFTKVERIPKALEVTESPLVKAIFHACRAMHASLPGKADGQQSSFCHCERASGHLWSSLNVSGATSDPALNHVVQLLTCDLLLSLRTALWQKQASASQAVGETYHASGAELAGFQRDLGSLRRLAHSFRPAYRKVFLHEATVRLMAGASPTRTHQLLEHSLRRRTTQSTKHGEVDAWPGQRERATAILLACRHLPLSFLSSPGQRAVLLAEAARTLEKVGDRRSCNDCQQMIVKLGGGTAIAAS

SEQ ID NO: 15690 - protein, 508 aa, Homo Sapiens
MLPTQAGAAAALGRGSALGGSLNRTPTGRPGGGGGTRGANGGRVPGNGAGLGPGRLEREAAAAAATTPAPTAGALYSGSEGDSESGEEEELGAERRGLKRSLSEMEIGMVVGGPEASAAATGGYGPVSGAVSGAKPGKKTRGRVKIKMEFIDNKLRRYTTFSKRKTGIMKKAYELSTLTGTQVLLLVASETGHVYTFATRKLQPMITSETGKALIQTCLNSPDSPPRSDPTTDQRMSATGFEETDLTYQVSESDSSGETKDTLKPAFTVTNLPGTTSTIQTAPSTSTTMQVSSGPSFPITNYLAPVSASVSPSAVSSANGTVLKSTGSGPVSSGGLMQLPTSFTLMPGGAVAQQVPVQAIQVHQAPQQASPSRDSSTDLTQTSSSGTVTLPATIMTSSVPTTVGGHMMYPSPHAVMYAPTSGLGDGSLTVLNAFSQAPSTMQVSHSQVQEPGGVPQVFLTASSGTVQIPVSAVQLHQMAVIGQQAGSSSNLTELQVVNLDTAHSTKSE

SEQ ID NO: 15691 - protein, 204 aa, Homo Sapiens
MQSYASAMLSVFNSDDYSPAVQENIPALRRSSSFLCTESCNSKYQCETGENSKGNVQDRVKRPMNAFIVWSRDQRRKMALENPRMRNSEISKQLGYQWKMLTEAEKWPFFQEAQKLQAMHREKYPNYKYRPRRKAKMLPKNCSLLPADPASVLCSEVQLDNRLYRDDCTKATHSRMEHQLGHLPPINAASSPQQRDRYSHWTKL

SEQ ID NO: 15692 - protein, 709 aa, Homo Sapiens
MAETLEFNDVYQEVKGSMNDGRLRLSRQGIIFKNSKTGKVDNIQAGELTEGIWRRVALGHGLKLLTKNGHVYKYDGFRESEFEKLSDFFKTHYRLELMEKDLCVKGWNWGTVKFGGQLLSFDIGDQPVFEIPLSNVSQCTTGKNEVTLEFHQNDDAEVSLMEVRFYVPPTQEDGVDPVEAFAQNVLSKADVIQATGDAICIFRELQCLTPRGRYDIRIYPTFLHLHGKTFDYKIPYTTVLRLFLLPHKDQRQMFFVISLDPPIKQGQTRYHFLILLFSKDEDISLTLNMNEEEVEKRFEGRLTKNMSGSLYEMVSRVMKALVNRKITVPGNFQGHSGAQCITCSYKASSGLLYPLERGFIYVHKPPVHIRFDEISFVNFARGTTTTRSFDFEIETKQGTQYTFSSIEREEYGKLFDFVNAKKLNIKNRGLKEGMNPSYDEYADSDEDQHDAYLERMKEEGKIREENANDSSDDSGEETDESFNPGEEEEDVAEEFDSNASASSSSNEGDSDRDEKKRKQLKKAKMAKDRKSRKKPVEVKKGKDPNAPKRPMSAYMLWLNASREKIKSDHPGISITDLSKKAGEIWKGMSKEKKEEWDRKAEDARRDYEKAMKEYEGGRGESSKRDKSKKKKKVKVKMEKKSTPSRGSSSKSSSRQLSESFKSKEFVSSDESSSGENKSKKKRRRSEDSEEEELASTPPSSEDSASGSDE

SEQ ID NO: 15693 - protein, 1047 aa, Homo Sapiens
MDAEAEDKTLRTRSKGTEVPMDSLIQELSVAYDCSMAKKRTAEDQALGVPVNKRKSLLMKPRHYSPKADCQEDRSDRTEDDGPLETHGHSTAEEIMIKPMDESLLSTAQENSSRKEDRYSCYQELMVKSLMHLGKFEKNVSVQTVSENLNDSGIQSLKAESDEADECFLIHSDDGRDKIDDSQPPFCSSDDNESNSESAENGWDSGSNFSEETKPPRVPKYVLTDHKKDLLEVPEIKTEGDKFIPCENRCDSETERKDPQNALAEPLDGNAQPSFPDVEEEDSESLAVMTEEGSDLEKAKGNLSLLEQAIALQAERGCVFHNTYKELDRFLLEHLAGERRQTKVIDMGGRQIFNNKHSPRPEKRETKCPIPGCDGTGHVTGLYPHHRSLSGCPHKVRVPLEILAMHENVLKCPTPGCTGRGHVNSNRNTHRSLSGCPIAAAEKLAMSQDKNQLDSPQTGQCPDQAHRTSLVKQIEFNFPSQAITSPRATVSKEQEKFGKVPFDYASFDAQVFGKRPLIQTVQGRKTPPFPESKHFPNPVKFPNRLPSAGAHTQSPGRASSYSYGQCSEDTHIAAAAAILNLSTRCREATDILSNKPQSLHAKGAEIEVDENGTLDLSMKKNRILDKSAPLTSSNTSIPTPSSSPFKTSSILVNAAFYQALCDQEGWDTPINYSKTHGKTEEEKEKDPVSSLENLEEKKFPGEASIPSPKPKLHARDLKKELITCPTPGCDGSGHVTGNYASHRSVSGCPLADKTLKSLMAANSQELKCPTPGCDGSGHVTGNYASHRSLSGCPRARKGGVKMTPTKEEKEDPELKCPVIGCDGQGHISGKYTSHRTASGCPLAAKRQKENPLNGASLSWKLNKQELPHCPLPGCNGLGHVNNVFVTHRSLSGCPLNAQVIKKGKVSEELMTIKLKATGGIESDEEIRHLDEEIKELNESNLKIEADMMKLQTQITSMESNLKTIEEENKLIEQNNESLLKELAGLSQALISSLADIQLPQMGPISEQNFEAYVNTLTDMYSNLERDYSPECKALLESIKQAVKGIHV

SEQ ID NO: 15694 - protein, 750 aa, Homo Sapiens
MSQWYELQQLDSKFLEQVHQLYDDSFPMEIRQYLAQWLEKQDWEHAANDVSFATIRFHDLLSQLDDQYSRFSLENNFLLQHNIRKSKRNLQDNFQEDPIQMSMIIYSCLKEERKILENAQRFNQAQSGNIQSTVMLDKQKELDSKVRNVKDKVMCIEHEIKSLEDLQDEYDFKCKTLQNREHETNGVAKSDQKQEQLLLKKMYLMLDNKRKEVVHKIIELLNVTELTQNALINDELVEWKRRQQSACIGGPPNACLDQLQNWFTIVAESLQQVRQQLKKLEELEQKYTYEHDPITKNKQVLWDRTFSLFQQLIQSSFVVERQPCMPTHPQRPLVLKTGVQFTVKLRLLVKLQELNYNLKVKVLFDKDVNERNTVKGFRKFNILGTHTKVMNMEESTNGSLAAEFRHLQLKEQKNAGTRTNEGPLIVTEELHSLSFETQLCQPGLVIDLETTSLPVVVISNVSQLPSGWASILWYNMLVAEPRNLSFFLTPPCARWAQLSEVLSWQFSSVTKRGLNVDQLNMLGEKLLGPNASPDGLIPWTRFCKENINDKNFPFWLWIESILELIKKHLLPLWNDGCIMGFISKERERALLKDQQPGTFLLRFSESSREGAITFTWVERSQNGGEPDFHAVEPYTKKELSAVTFPDIIRNYKVMAAENIPENPLKYLYPNIDKDHAFGKYYSRPKEAPEPMELDGPKGTGYIKTELISVSEVHPSRLQTTDNLLPMSPEEFDEVSRIVGSVEFDSMMNTV

SEQ ID NO: 15695 - protein, 851 aa, Homo Sapiens
MAQWEMLQNLDSPFQDQLHQLYSHSLLPVDIRQYLAVWIEDQNWQEAALGSDDSKATMLFFHFLDQLNYECGRCSQDPESLLLQHNLRKFCRDIQPFSQDPTQLAEMIFNLLLEEKRILIQAQRAQLEQGEPVLETPVESQQHEIESRILDLRAMMEKLVKSISQLKDQQDVFCFRYKIQAKGKTPSLDPHQTKEQKILQETLNELDKRRKEVLDASKALLGRLTTLIELLLPKLEEWKAQQQKACIRAPIDHGLEQLETWFTAGAKLLFHLRQLLKELKGLSCLVSYQDDPLTKGVDLRNAQVTELLQRLLHRAFVVETQPCMPQTPHRPLILKTGSKFTVRTRLLVRLQEGNESLTVEVSIDRNPPQLQGFRKFNILTSNQKTLTPEKGQSQGLIWDFGYLTLVEQRSGGSGKGSNKGPLGVTEELHIISFTVKYTYQGLKQELKTDTLPVVIISNMNQLSIAWASVLWFNLLSPNLQNQQFFSNPPKAPWSLLGPALSWQFSSYVGRGLNSDQLSMLRNKLFGQNCRTEDPLLSWADFTKRESPPGKLPFWTWLDKILELVHDHLKDLWNDGRIMGFVSRSQERRLLKKTMSGTFLLRFSESSEGGITCSWVEHQDDDKVLIYSVQPYTKEVLQSLPLTEIIRHYQLLTEENIPENPLRFLYPRIPRDEAFGCYYQEKVNLQERRKYLKHRLIVVSNRQVDELQQPLELKPEPELESLELELGLVPEPELSLDLEPLLKAGLDLGPELESVLESTLEPVIEPTLCMVSQTVPEPDQGPVSQPVPEPDLPCDLRHLNTEPMEIFRNCVKIEEIMPNGDPLLAGQNTVDEVYVSRPSHFYTDGPLMPSDF

SEQ ID NO: 15696 - protein, 770 aa, Homo Sapiens
MAQWNQLQQLDTRYLEQLHQLYSDSFPMELRQFLAPWIESQDWAYAASKESHATLVFHNLLGEIDQQYSRFLQESNVLYQHNLRRIKQFLQSRYLEKPMEIARIVARCLWEESRLLQTAATAAQQGGQANHPTAAVVTEKQQMLEQHLQDVRKRVQDLEQKMKVVENLQDDFDFNYKTLKSQGDMQDLNGNNQSVTRQKMQQLEQMLTALDQMRRSIVSELAGLLSAMEYVQKTLTDEELADWKRRQQIACIGGPPNICLDRLENWITSLAESQLQTRQQIKKLEELQQKVSYKGDPIVQHRPMLEERIVELFRNLMKSAFVVERQPCMPMHPDRPLVIKTGVQFTTKVRLLVKFPELNYQLKIKVCIDKDSGDVAALRGSRKFNILGTNTKVMNMEESNNGSLSAEFKHLTLREQRCGNGGRANCDASLIVTEELHLITFETEVYHQGLKIDLETHSLPVVVISNICQMPNAWASILWYNMLTNNPKNVNFFTKPPIGTWDQVAEVLSWQFSSTTKRGLSIEQLTTLAEKLLGPGVNYSGCQITWAKFCKENMAGKGFSFWVWLDNIIDLVKKYILALWNEGYIMGFISKERERAILSTKPPGTFLLRFSESSKEGGVTFTWVEKDISGKTQIQSVEPYTKQQLNNMSFAEIIMGYKIMDATNILVSPLVYLYPDIPKEEAFGKYCRPESQEHPEADPGSAAPYLKTKFICVTPTTCSNTIDLPMSPRTLDSLMQFGNNGEGAEPSAGGQFESLTFDMELTSECATSPM

SEQ ID NO: 15697 - protein, 748 aa, Homo Sapiens
MSQWNQVQQLEIKFLEQVDQFYDDNFPMEIRHLLAQWIENQDWEAASNNETMATILLQNLLIQLDEQLGRVSKEKNLLLIHNLKRIRKVLQGKFHGNPMHVAVVISNCLREERRILAAANMPVQGPLEKSLQSSSVSERQRNVEHKVAAIKNSVQMTEQDTKYLEDLQDEFDYRYKTIQTMDQSDKNSAMVNQEVLTLQEMLNSLDFKRKEALSKMTQIIHETDLLMNTMLIEELQDWKRRQQIACIGGPLHNGLDQLQNCFTLLAESLFQLRRQLEKLEEQSTKMTYEGDPIPMQRTHMLERVTFLIYNLFKNSFVVERQPCMPTHPQRPLVLKTLIQFTVKLRLLIKLPELNYQVKVKASIDKNVSTLSNRRFVLCGTNVKAMSIEESSNGSLSVEFRHLQPKEMKSSAGGKGNEGCHMVTEELHSITFETQICLYGLTIDLETSSLPVVMISNVSQLPNAWASIIWYNVSTNDSQNLVFFNNPPPATLSQLLEVMSWQFSSYVGRGLNSDQLHMLAEKLTVQSSYSDGHLTWAKFCKEHLPGKSFTFWTWLEAILDLIKKHILPLWIDGYVMGFVSKEKERLLLKDKMPGTFLLRFSESHLGGITFTWVDHSESGEVRFHSVEPYNKGRLSALPFADILRDYKVIMAENIPENPLKYLYPDIPKDKAFGKHYSSQPCEVSRPTERGDKGYVPSVFIPISTIRSDSTEPHSPSDLLPMSPSVYAVLRENLSPTTIETAMKSPYSAE

SEQ ID NO: 15698 - protein, 794 aa, Homo Sapiens
MAGWIQAQQLQGDALRQMQVLYGQHFPIEVRHYLAQWIESQPWDAIDLDNPQDRAQATQLLEGLVQELQKKAEHQVGEDGFLLKIKLGHYATQLQKTYDRCPLELVRCIRHILYNEQRLVREANNCSSPAGILVDAMSQKHLQINQTFEELRLVTQDTENELKKLQQTQEYFIIQYQESLRIQAQFAQLAQLSPQERLSRETALQQKQVSLEAWLQREAQTLQQYRVELAEKHQKTLQLLRKQQTIILDDELIQWKRRQQLAGNGGPPEGSLDVLQSWCEKLAEIIWQNRQQIRRAEHLCQQLPIPGPVEEMLAEVNATITDIISALVTSTFIIEKQPPQVLKTQTKFAATVRLLVGGKLNVHMNPPQVKATIISEQQAKSLLKNENTRNECSGEILNNCCVMEYHQATGTLSAHFRNMSLKRIKRADRRGAESVTEEKFTVLFESQFSVGSNELVFQVKTLSLPVVVIVHGSQDHNATATVLWDNAFAEPGRVPFAVPDKVLWPQLCEALNMKFKAEVQSNRGLTKENLVFLAQKLFNNSSSHLEDYSGLSVSWSQFNRENLPGWNYTFWQWFDGVMEVLKKHHKPHWNDGAILGFVNKQQAHDLLINKPDGTFLLRFSDSEIGGITIAWKFDSPERNLWNLKPFTTRDFSIRSLADRLGDLSYLIYVFPDRPKDEVFSKYYTPVLAKAVDGYVKPQIKQVVPEFVNASADAGGSSATYMDQAPSPAVCPQAPYNMYPQNPDHVLDQDGEFDLDETMDVARHVEELLRRPMDSLDSRLSPPAGLFTSARGSLS

SEQ ID NO: 15699 - protein, 794 aa, Homo Sapiens; identical to SEQ ID NO: 15698

SEQ ID NO: 15700 - protein, 787 aa, Homo Sapiens
MAVWIQAQQLQGEALHQMQALYGQHFPIEVRHYLSQWIESQAWDSVDLDNPQENIKATQLLEGLVQELQKKAEHQVGEDGFLLKIKLGHYATQLQNTYDRCPMELVRCIRHILYNEQRLVREANNGSSPAGSLADAMSQKHLQINQTFEELRLVTQDTENELKKLQQTQEYFIIQYQESLRIQAQFGPLAQLSPQERLSRETALQQKQVSLEAWLQREAQTLQQYRVELAEKHQKTLQLLRKQQTIILDDELIQWKRRQQLAGNGGPPEGSLDVLQSWCEKLAEIIWQNRQQIRRAEHLCQQLPIPGPVEEMLAEVNATITDIISALVTSTFIIEKQPPQVLKTQTKFAATVRLLVGGKLNVHMNPPQVKATIISEQQAKSLLKNENTRNDYSGEILNNCCVMEYHQATGTLSAHFRNMSLKRIKRSDRRGAESVTEEKFTILFESQFSVGGNELVFQVKTLSLPVVVIVHGSQDNNATATVLWDNAFAEPGRVPFAVPDKVLWPQLCEALNMKFKAEVQSNRGLTKENLVFLAQKLFNNSSSHLEDYSGLSVSWSQFNRENLPGRNYTFWQWFDGVMEVLKKHLKPHWNDGAILGFVNKQQAHDLLINKPDGTFLLRFSDSEIGGITIAWKFDSQERMFWNLMPFTTRDFSIRSLADRLGDLNYLIYVFPDRPKDEVYSKYYTPVPCESATAKAVDGYVKPQIKQVVPEFVNASADAGGGSATYMDQAPSPAVCPQAHYNMYPQNPDSVLDTDGDFDLEDTMDVARRVEELLGRPMDSQWIPHAQS

SEQ ID NO: 15701 - protein, 847 aa, Homo Sapiens
MSLWGLVSKMPPEKVQRLYVDFPQHLRHLLGDWLESQPWEFLVGSDAFCCNLASALLSDTVQHLQASVGEQGEGSTILQHISTLESIYQRDPLKLVATFRQILQGEKKAVMEQFRHLPMPFHWKQEELKFKTGLRRLQHRVGEIHLLREALQKGAEAGQVSLHSLIETPANGTGPSEALAMLLQETTGELEAAKALVLKRIQIWKRQQQLAGNGAPFEESLAPLQERCESLVDIYSQLQQEVGAAGGELEPKTRASLTGRLDEVLRTLVTSCFLVEKQPPQVLKTQTKFQAGVRFLLGLRFLGAPAKPPLVRADMVTEKQARELSVPQGPGAGAESTGEIINNTVPLENSIPGNCCSALFKNLLLKKIKRCERKGTESVTEEKCAVLFSASFTLGPGKLPIQLQALSLPLVVIVHGNQDNNAKATILWDNAFSEMDRVPFVVAERVPWEKMCETLNLKFMAEVGTNRGLLPEHFLFLAQKIFNDNSLSMEAFQHRSVSWSQFNKEILLGRGFTFWQWFDGVLDLTKRCLRSYWSDRLIIGFISKQYVTSLLLNEPDGTFLLRFSDSEIGGITIAHVIRGQDGSPQIENIQPFSAKDLSIRSLGDRIRDLAQLKNLYPKKPKDEAFRSHYKPEQMGKDGRGYVPATIKMTVERDQPLPTPELQMPTMVPSYDLGMAPDSSMSMQLGPDMVPQVYPPHSHSIPPYQGLSPEESVNVLSAFQEPHLQMPPSLGQMSLPFDQPHPQGLLPCQPQEHAVSSPDPLLCSDVTMVEDSCLSQPVTAFPQGTWIGEDIFPPLLPPTEQDLTKLLLEGQGESGGGSLGAQPLLQPSHYGQSGISMSHMDLRANPSW

SEQ ID NO: 15702 - protein, 443 aa, Homo Sapiens
MDRLGPFSNDPSDKPPCRGCSSYLMEPYIKCAECGPPPFFLCLQCFTRGFEYKKHQSDHTYEIMTSDFPVLDPSWTAQEEMALLEAVMDCGFGNWQDVANQMCTKTKEECEKHYMKHFINNPLFASTLLNLKQAEEAKTADTAIPFHSTDDPPRPTFDSLLSRDMAGYMPARADFIEEFDNYAEWDLRDIDFVEDDSDILHALKMAVVDIYHSRLKERQRRKKIIRDHGLINLRKFQLMERRYPKEVQDLYETMRRFARIVGPVEHDKFIESHALEFELRREIKRLQEYRTAGITNFCSARTYDHLKKTREEERLKRTMLSEVLQYIQDSSACQQWLRRQADIDSGLSPSIPMASNSGRRSAPPLNLTGLPGTEKLNEKEKELCQMVRLVPGAYLEYKSALLNECNKQGGLRLAQARALIKIDVNKTRKIYDFLIREGYITKG

SEQ ID NO: 15703 - protein, 420 aa, Homo Sapiens
MAELGKKYCVYCLAEVSPLRFRCTECQDIELCPECFSAGAEIGHHRRYHGYQLVDGGRFTLWGPEAEGGWTSREEQLLLDAIEQFGFGNWEDMAAHVGASRTPQEVMEHYVSMYIHGNLGKACIPDTIPNRVTDHTCPSGGPLSPSLTTPLPPLDISVAEQQQLGYMPLRDDYEIEYDQDAETLISGLSVNYDDDDVEIELKRAHVDMYVRKLKERQRRKNIARDYNLVPAFLGKDKKEKEKALKRKITKEEKELRLKLRPLYQFMSCKEFDDLFENMHKEKMLRAKIRELQRYRRNGITKMEESAEYEAARHKREKRKENKNLAGSKRGKEDGKDSEFAAIENLPGFELLSDREKVLCSSLNLSPARYVTVKTIIIKDHLQKRQGIPSKSRLPSYLDKVLKKRILNFLTESGWISRDAS

SEQ ID NO: 15704 - protein, 1872 aa, Homo Sapiens
MGPGCDLLLRTAATITAAAIMSDTDSDEDSAGGGPFSLAGFLFGNINGAGQLEGESVLDDECKKHLAGLGALGLGSLITELTANEELTGTDGALVNDEGWVRSTEDAVDYSDINEVAEDESRRYQQTMGSLQPLCHSDYDEDDYDADCEDIDCKLMPPPPPPPGPMKKDKDQDSITGEKVDFSSSSDSESEMGPQEATQAESEDGKLTLPLAGIMQHDATKLLPSVTELFPEFRPGKVLRFLRLFGPGKNVPSVWRSARRKRKKKHRELIQEEQIQEVECSVESEVSQKSLWNYDYAPPPPPEQCLSDDEITMMAPVESKFSQSTGDIDKVTDTKPRVAEWRYGPARLWYDMLGVPEDGSGFDYGFKLRKTEHEPVIKSRMIEEFRKLEENNGTDLLADENFLMVTQLHWEDDIIWDGEDVKHKGTKPQRASLAGWLPSSMTRNAMAYNVQQGFAATLDDDKPWYSIFPIDNEDLVYGRWEDNIIWDAQAMPRLLEPPVLTLDPNDENLILEIPDEKEEATSNSPSKESKKESSLKKSRILLGKTGVIKEEPQQNMSQPEVKDPWNLSNDEYYYPKQQGLRGTFGGNIIQHSIPAVELRQPFFPTHMGPIKLRQFHRPPLKKYSFGALSQPGPHSVQPLLKHIKKKAKMREQERQASGGGEMFFMRTPQDLTGKDGDLILAEYSEENGPLMMQVGMATKIKNYYKRKPGKDPGAPDCKYGETVYCHTSPFLGSLHPGQLLQAFENNLFRAPIYLHKMPETDFLIIRTRQGYYIRELVDIFVVGQQCPLFEVPGPNSKRANTHIRDFLQVFIYRLFWKSKDRPRRIRMEDIKKAFPSHSESSIRKRLKLCADFKRTGMDSNWWVLKSDFRLPTEEEIRAMVSPEQCCAYYSMIAAEQRLKDAGYGEKSFFAPEEENEEDFQMKIDDEVRTAPWNTTRAFIAAMKGKCLLEVTGVADPTGCGEGFSYVKIPNKPTQQKDDKEPQPVKKTVTGTDADLRRLSLKNAKQLLRKFGVPEEEIKKLSRWEVIDVVRTMSTEQARSGEGPMSKFARGSRFSVAEHQERYKEECQRIFDLQNKVLSSTEVLSTDTDSSSAEDSDFEEMGKNIENMLQNKKTSSQLSREREEQERKELQRMLLAAGSAASGNNHRDDDTASVTSLNSSATGRCLKIYRTFRDEEGKEYVRCETVRKPAVIDAYVRIRTTKDEEFIRKFALFDEQHREEMRKERRRIQEQLRRLKRNQEKEKLKGPPEKKPKKMKERPDLKLKCGACGAIGHMRTNKFCPLYYQTNAPPSNPVAMTEEQEEELEKTVIHNDNEELIKVEGTKIVLGKQLIESADEVRRKSLVLKFPKQQLPPKKKRRVGTTVHCDYLNRPHKSIHRRRTDPMVTLSSILESIINDMRDLPNTYPFHTPVNAKVVKDYYKIITRPMDLQTLRENVRKRLYPSREEFREHLELIVKNSATYNGPKHSLTQISQSMLDLCDEKLKEKEDKLARLEKAINPLLDDDDQVAFSFILDNIVTQKMMAVPDSWPFHHPVNKKFVPDYYKVIVNPMDLETIRKNISKHKYQSRESFLDDVNLILANSVKYNGPESQYTKTAQEIVNVCYQTLTEYDEHLTQLEKDICTAKEAALEEAELESLDPMTPGPYTPQPPDLYDTNTSLSMSRDASVFQDESNMSVLDIPSATPEKQVTQEGEDGDGDLADEEEGTVQQPQASVLYEDLLMSEGEDDEEDAGSDEEGDNPFSAIQLSESGSDSDVGSGGIRPKQPRMLQENTRMDMENEESMMSYEGDGGEASHGLEDSNISYGSYEEPDPKSNTQDTSFSSIGGYEVSEEEEDEEEEEQRSGPSVLSQVHLSEDEEDSEDFHSIAGDSDLDSDE

SEQ ID NO: 15705 - protein, 331 aa, Homo Sapiens
MTERPPSEAARSDPQLEGRDAAEASMAPPHLVLLNGVAKETSRAAAAEPPVIELGARGGPGGGPAGGGGAARDLKGRDAATAEARHRVPTTELCRPPGPAPAPAPASVTAELPGDGRMVQLSPPALAAPAAPGRALLYSLSQPLASLGSGFFGEPDAFPMFTTNNRVKRRPSPYEMEITDGPHTKVVRRIFTNSRERWRQQNVNGAFAELRKLIPTHPPDKKLSKNEILRLAMKYINFLAKLLNDQEEEGTQRAKTGKDPVVGAGGGGGGGGGGAPPDDLLQDVLSPNSSCGSSLDGAASPDSYTEEPAPKHTARSLHPAMLPAADGAGPR

SEQ ID NO: 15706 - protein, 108 aa, Homo Sapiens
MTRKIFTNTRERWRQQNVNSAFAKLRKLIPTHPPDKKLSKNETLRLAMRYINFLVKVLGEQSLQQTGVAAQGNILGLFPQGPHLPGLEDRTLLENYQVPSPGPSHHIP

SEQ ID NO: 15707 - protein, 789 aa, Homo Sapiens
MTSFQEVPLQTSNFAHVIFQNVAKSYLPNAHLECHYTLTPYIHPHPKDWVGIFKVGWSTARDYYTFLWSPMPEHYVEGSTVNCVLAFQGYYLPNDDGEFYQFCYVTHKGEIRGASTPFQFRASSPVEELLTMEDEGNSDMLVVTTKAGLLELKIEKTMKEKEELLKLIAVLEKETAQLREQVGRMERELNHEKERCDQLQAEQKGLTEVTQSLKMENEEFKKRFSDATSKAHQLEEDIVSVTHKAIEKETELDSLKDKLKKAQHEREQLECQLKTEKDEKELYKVHLKNTEIENTKLMSEVQTLKNLDGNKESVITHFKEEIGRLQLCLAEKENLQRTFLLTTSSKEDTCFLKEQLRKAEEQVQATRQEVVFLAKELSDAVNVRDRTMADLHTARLENEKVKKQLADAVAELKLNAMKKDQDKTDTLEHELRREVEDLKLRLQMAADHYKEKFKECQRLQKQINKLSDQSANNNNVFTKKTGNQQKVNDASVNTDPATSASTVDVKPSPSAAEADFDIVTKGQVCEMTKEIADKTEKYNKCKQLLQDEKAKCNKYADELAKMELKWKEQVKIAENVKLELAEVQDNYKELKRSLENPAERKMEGQNSQSPQCFKTCSEQNGYVLTLSNAQPVLQYGNPYASQETRDGADGAFYPDEIQRPPVRVPSWGLEDNVVCSQPARNFSRPDGLEDSEDSKEDENVPTAPDPPSQHLRGHGTGFCFDSSFDVHKKCPLCELMFPPNYDQSKFEEHVESHWKVCPMCSEQFPPDYDQQVFERHVQTHFDQNVLNFD

SEQ ID NO: 15708 - protein, 124 aa, Homo Sapiens
MSYIPGQPVTAVVQRVEIHKLRQGENLILGFSIGGGIDQDPSQNPFSEDKTDKGIYVTRVSEGGPAEIAGLQIGDKIMQVNGWDMTMVTHDQARKRLTKRSEEVVRLLVTRQSLQKAVQQSMLS

SEQ ID NO: 15709 - protein, 535 aa, Homo Sapiens
MGIVEPGCGDMLTGTEPMPGSDEGRAPGADPQHRYFYPEPGAQDADERRGGGSLGSPYPGGALVPAPPSRFLGAYAYPPRPQAAGFPGAGESFPPPADAEGYQPGEGYAAPDPRAGLYPGPREDYALPAGLEVSGKLRVALNNHLLWSKFNQHQTEMIITKQGRRMFPFLSFTVAGLEPTSHYRMFVDVVLVDQHHWRYQSGKWVQCGKAEGSMPGNRLYVHPDSPNTGAHWMRQEVSFGKLKLTNNKGASNNVTQMIVLQSLHKYQPRLHIVEVNDGEPEAACNASNTHIFTFQETQFIAVTAYQNAEITQLKIDNNPFAKGFRENFESMYTSVDTSIPSPPGPNCQFLGGDHYSPLLPNQYPVPSRFYPDLPGQAKDVVPQAYWLGAPRDHSYEAEFRAVSMKPAFLPSAPGPTMSYYRGQEVLAPGAGWPVAPQYPPKMGPASWFRPMRTLPMEPGPGGSEGRGPEDQGPPLVWTEIAPIRPESSDSGLGEGDSKRRRVSPYPSSGDSSSPAGAPSPFDKEAEGQFYNYFPN

SEQ ID NO: 15710 - protein, 339 aa, Homo Sapiens
MDQNNSLPPYAQGLASPQGAMTPGIPIFSPMMPYGTGLTPQPIQNTNSLSILEEQQRQQQQQQQQQQQQQQQQQQQQQQQQQQQQQQQQQQQQQQAVAAAAVQQSTSQQATQGTSGQAPQLFHSQTLTTAPLPGTTPLYPSPMTPMTPITPATPASESSGIVPQLQNIVSTVNLGCKLDLKTIALRARNAEYNPKRFAAVIMRIREPRTTALIFSSGKMVCTGAKSEEQSRLAARKYARVVQKLGFPAKFLDFKIQNMVGSCDVKFPIRLEGLVLTHQQFSSYEPELFPGLIYRMIKPRIVLLIFVSGKVVLTGAKVRAEIYEAFENIYPILKGFRKTT

SEQ ID NO: 15711 - protein, 186 aa, Homo Sapiens
MDADSDVALDILITNVVCVFRTRCHLNLRKIALEGANVIYKRDVGKVLMKLRKPRITATIWSSGKIICTGATSEEEAKFGARRLARSLQKLGFQVIFTDFKVVNVLAVCNMPFEIRLPEFTKNNRPHASYEPELHPAVCYRIKSLRATLQIFSTGSITVTGPNVKAVATAVEQIYPFVFESRKEIL

SEQ ID NO: 15712 - protein, 375 aa, Homo Sapiens
MASAPWPERVPRLLAPRLPSYPPPPPTVGLRSMEQEETYLELYLDQCAAQDGLAPPRSPLFSPVVPYDMYILNASNPDTAFNSNPEVKETSGDFSSVDLSFLPDEVTQENKDQPVISKHETEENSESQSPQSRLPSPSEQDVGLGLNSSSLSNSHSQLHPGDTDSVQPSPEKPNSDSLSLASITPMTPMTPISECCGIVPQLQNIVSTVNLACKLDLKKIALHAKNAEYNPKRFAAVIMRIREPRTTALIFSSGKMVCTGAKSEEQSRLAARKYARVVQKLGFPARFLDFKIQNMVGSCDVRFPIRLEGLVLTHQQFSSYEPELFPGLIYRMVKPRIVLLIFVSGKVVLTGAKERSEIYEAFENIYPILKGFKKA

SEQ ID NO: 15713 - protein, 682 aa, Homo Sapiens
MQLEHCLSPSIMLSKKFLNVSSSYPHSGGSELVLHDHPIISTTDNLERSSPLKKITRGMTNQSDTDNFPDSKDSPGDVQRSKLSPVLDGVSELRHSFDGSAADRYLLSQSSQPQSAATAPSAMFPYPGQHGPAHPAFSIGSPSRYMAHHPVITNGAYNSLLSNSSPQGYPTAGYPYPQQYGHSYQGAPFYQFSSTQPGLVPGKAQVYLCNRPLWLKFHRHQTEMIITKQGRRMFPFLSFNISGLDPTAHYNIFVDVILADPNHWRFQGGKWVPCGKADTNVQGNRVYMHPDSPNTGAHWMRQEISFGKLKLTNNKGASNNNGQMVVLQSLHKYQPRLHVVEVNEDGTEDTSQPGRVQTFTFPETQFIAVTAYQNTDITQLKIDHNPFAKGFRDNYDTIYTGCDMDRLTPSPNDSPRSQIVPGARYAMAGSFLQDQFVSNYAKARFHPGAGAGPGPGTDRSVPHTNGLLSPQQAEDPGAPSPQRWFVTPANNRLDFAASAYDTATDFAGNAATLLSYAAAGVKALPLQAAGCTGRPLGYYADPSGWGARSPPQYCGTKSGSVLPCWPNSAAAAARMAGANPYLGEEAEGLAAERSPLPPGAAEDAKPKDLSDSSWIETPSSIKSIDSSDSGIYEQAKRRRISPADTPVSESSSPLKSEVLAQRDCEKNCAKDISGYYGFYSHS

SEQ ID NO: 15714 - protein, 398 aa, Homo Sapiens
MHFSTVTRDMEAFTASSLSSLGAAGGFPGAASPGADPYGPREPPPPPPRYDPCAAAAPGAPGPPPPPHAYPFAPAAGAATSAAAEPEGPGASCAAAAKAPVKKNAKVAGVSVQLEMKALWDEFNQLGTEMIVTKAGRRMFPTFQVKLFGMDPMADYMLLMDFVPVDDKRYRYAFHSSSWLVAGKADPATPGRVHYHPDSPAKGAQWMKQIVSFDKLKLTNNLLDDNGHIILNSMHRYQPRFHVVYVDPRKDSEKYAEENFKTFVFEETRFTAVTAYQNHRITQLKIASNPFAKGFRDCDPEDWPRNHRPGALPLMSAFARSRNPVASPTQPSGTEKGGHVLKDKEVKAETSRNTPEREVELLRDAGGCVNLGLPCPAECQPFNTQGLVAGRTAGDRLC

SEQ ID NO: 15715 - protein, 385 aa, Homo Sapiens; identical to SEQ ID NO: 13037

SEQ ID NO: 15716 - protein, 602 aa, Homo Sapiens
MSERRRSAVALSSRAHAFSVEALIGSNKKRKLRDWEEKGLDLSMEALSPAGPLGDTEDAAAHGLEPHPDSEQSTGSDSEVLTERTSCSFSTHTDLASGAAGPVPAAMSSMEEIQVELQCADLWKRFHDIGTEMIITKAGRRMFPAMRVKITGLDPHQQYYIAMDIVPVDNKRYRYVYHSSKWMVAGNADSPVPPRVYIHPDSLASGDTWMRQVVSFDKLKLTNNELDDQGHIILHSMHKYQPRVHVIRKDFSSDLSPTKPVPVGDGVKTFNFPETVFTTVTAYQNQQITRLKIDRNPFAKGFRDSGRNRTGLEAIMETYAFWRPPVRTLTFEDFTTMQKQQGGSTGTSPTTSSTGTPSPSASSHLLSPSCSPPTFHLAPNTFNVGCRESQLCNLNLSDYPPCARSNMAALQSYPGLSDSGYNRLQSGTTSATQPSETFMPQRTPSLISGIPTPPSLPGNSKMEAYGGQLGSFPTSQFQYVMQAGNAASSSSSPHMFGGSHMQQSSYNAFSLHNPYNLYGYNFPTSPRLAASPEKLSASQSTLLCSSPSNGAFGERQYLPSGMEHSMHMISPSPNNQQATNTCDGRQYGAVPGSSSQMSVHMV

SEQ ID NO: 15717 - protein, 607 aa, Homo Sapiens
MAEKRRGSPCSMLSLKAHAFSVEALIGAEKQQQLQKKRRKLGAEEAAGAVDDGGCSRGGGAGEKGSSEGDEGAALPPPAGATSGPARSGADLERGAAGGCEDGFQQGASPLASPGGSPKGSPARSLARPGTPLPSPQAPRVDLQGAELWKRFHEIGTEMIITKAGRRMFPAMRVKISGLDPHQQYYIAMDIVPVDNKRYRYVYHSSKWMVAGNADSPVPPRVYIHPDSPASGETWMRQVISFDKLKLTNNELDDQGHIILHSMHKYQPRVHVIRKDCGDDLSPIKPVPSGEGVKAFSFPETVFTTVTAYQNQQITRLKIDRNPFAKGFRDSGRNRMGLEALVESYAFWRPSLRTLTFEDIPGIPKQGNASSSTLLQGTGNGVPATHPHLLSGSSCSSPAFHLGPNTSQLCSLAPADYSACARSGLTLNRYSTSLAETYNRLTNQAGETFAPPRTPSYVGVSSSTSVNMSMGGTDGDTFSCPQTSLSMQISGMSPQLQYIMPSPSSNAFATNQTHQGSYNTFRLHSPCALYGYNFSTSPKLAASPEKIVSSQGSFLGSSPSGTMTDRQMLPPVEGVHLLSSGGQQSFFDSRTLGSLTLSSSQVSAHMV

SEQ ID NO: 15718 - protein, 448 aa, Homo Sapiens
MAMSELGTRKPSDGTVSHLLNVVESELQAGREKGDPTEKQLQIILEDAPLWQRFKEVTNEMIVTKNGRRMFPVLKISVTGLDPNAMYSLLLDFVPTDSHRWKYVNGEWVPAGKPEVSSHSCVYIHPDSPNFGAHWMKAPISFSKVKLTNKLNGGGQIMLNSLHKYEPQVHIVRVGSAHRMVTNCSFPETQFIAVTAYQNEEITALKIKYNPFAKAFLDAKERNHLRDVPEAISESQHVTYSHLGGWIFSNPDGVCTAGNSNYQYAAPLPLPAPHTHHGCEHYSGLRGHRQAPYPSAYMHRNHSPSVNLIESSSNNLQVFSGPDSWTSLSSTPHASILSVPHTNGPINPGPSPYPCLWTISNGAGGPSGPGPEVHASTPGAFLLGNPAVTSPPSVLSTQAPTSAGVEVLGEPSLTSIAVSTWTAVASHPFAGWGGPGAGGHHSPSSLDG

SEQ ID NO: 15719 - protein, 712 aa, Homo Sapiens
MREPALAASAMAYHPFHAPRPADFPMSAFLAAAQPSFFPALALPPGALAKPLPDPGLAGAAAAAAAAAAAAEAGLHVSALGPHPPAAHLRSLKSLEPEDEVEDDPKVTLEAKELWDQFHKLGTEMVITKSGRRMFPPFKVRVSGLDKKAKYILLMDIVAADDCRYKFHNSRWMVAGKADPEMPKRMYIHPDSPATGEQWMAKPVAFHKLKLTNNISDKHGFTILNSMHKYQPRFHIVRANDILKLPYSTFRTYVFPETDFIAVTAYQNDKITQLKIDNNPFAKGFRDTGNGRREKRKQLTLPSLRLYEEHCKPERDGAESDASSCDPPPAREPPTSPGAAPSPLRLHRARAEEKSCAADSDPEPERLSEERAGAPLGRSPAPDSASPTRLTEPERARERRSPERGKEPAESGGDGPFGLRSLEKERAEARRKDEGRKEAAEGKEQGLAPLVVQTDSASPLGAGHLPGLAFSSHLHGQQFFGPLGAGQPLFLHPGQFTMGPGAFSAMGMGHLLASVAGGGNGGGGGPGTAAGLDAGGLGPAASAASTAAPFPFHLSQHMLASQGIPMPTFGGLFPYPYTYMAAAAAAASALPATSAAAAAAAAAGSLSRSPFLGSARPRLRFSPYQIPVTIPPSTSLLTTGLASEGSKAAGGNSREPSPLPELALRKVGAPSRGALSPSGSAKEAANELQSIQRLVSGLESQRALSPGRESPK

SEQ ID NO: 15720 - protein, 447 aa, Homo Sapiens
MEFTASPKPQLSSRANAFSIAALMSSGGSKEKEATENTIKPLEQFVEKSSCAQPLGELTSLDAHGEFGGGSGSSPSSSSLCTEPLIPTTPIIPSEEMAKIACSLETKELWDKFHELGTEMIITKSGRRMFPTIRVSFSGVDPEAKYIVLMDIVPVDNKRYRYAYHRSSWLVAGKADPPLPARLYVHPDSPFTGEQLLKQMVSFEKVKLTNNELDQHGHIILNSMHKYQPRVHIIKKKDHTASLLNLKSEEFRTFIFPETVFTAVTAYQNQLITKLKIDSNPFAKGFRDSSRLTDIERESVESLIQKHSYARSPIRTYGGEEDVLGDESQTTPNRGSAFTTSDNLSLSSWVSSSSSFPGFQHPQSLTALGTSTASIATPIPHPIQGSLPPYSRLGMPLTPSAIASSMQGSGPTFPSFHMPRYHHYFQQGPYAAIQGLRHSSAVMTPFV

SEQ ID NO: 15721 - protein, 535 aa, Homo Sapiens; identical to SEQ ID NO: 15709

SEQ ID NO: 15722 - protein, 520 aa, Homo Sapiens
MALSSRARAFSVEALVGRPSKRKLQDPIQAEQPELREKKGGEEEEERRSSAAGKSEPLEKQPKTEPSTSASSGCGSDSGYGNSSESLEEKDIQMELQGSELWKRFHDIGTEMIITKAGRRMFPSVRVKVKGLDPGKQYHVAIDVVPVDSKRYRYVYHSSQWMVAGNTDHLCIIPRFYVHPDSPCSGETWMRQIISFDRMKLTNNEMDDKGHIILQSMHKYKPRVHVIEQGSSVDLSQIQSLPTEGVKTFSFKETEFTTVTAYQNQQITKLKIERNPFAKGFRDTGRNRGVLDGLLETYPWRPSFTLDFKTFGADTQSGSSGSSPVTSSGGAPSPLNSLLSPLCFSPMFHLPTSSLGMPCPEAYLPNVNLPLCYKICPTNFWQQQPLVLPAPERLASSNSSQSLAPLMMEVPMLSSLGVTNSKSGSSEDSSDQYLQAPNSTNQMLYGLQSPGNIFLPNSITPEALSCSFHPSYDFYRYNFSMPSRLISGSNHLKVNDDSQVSFGEGKCNHVHWYPAINHYL

SEQ ID NO: 15723 - protein, 743 aa, Homo Sapiens
MSLSMRDPVIPGTSMAYHPFLPHRAPDFAMSAVLGHQPPFFPALTLPPNGAAALSLPGALAKPIMDQLVGAAETGIPFSSLGPQAHLRPLKTMEPEEEVEDDPKVHLEAKELWDQFHKRGTEMVITKSGRRMFPPFKVRCSGLDKKAKYILLMDIIAADDCRYKFHNSRWMVAGKADPEMPKRMYIHPDSPATGEQWMSKVVTFHKLKLTNNISDKHGFTLAFPSDHATWQGNYSFGTQTILNSMHKYQPRFHIVRANDILKLPYSTFRTYLFPETEFIAVTAYQNDKITQLKIDNNPFAKGFRDTGNGRREKRKQLTLQSMRVFDERHKKENGTSDESSSEQAAFNCFAQASSPAASTVGTSNLKDLCPSEGESDAEAESKEEHGPEACDAAKISTTTSEEPCRDKGSPAVKAHLFAAERPRDSGRLDKASPDSRHSPATISSSTRGLGAEERRSPVREGTAPAKVEEARALPGKEAFAPLTVQTDAAAAHLAQGPLPGLGFAPGLAGQQFFNGHPLFLHPSQFAMGGAFSSMAAAGMGPLLATVSGASTGVSGLDSTAMASAAAAQGLSGASAATLPFHLQQHVLASQGLAMSPFGSLFPYPYTYMAAAAAASSAAASSSVHRHPFLNLNTMRPRLRYSPYSIPVPVPDGSSLLTTALPSMAAAAGPLDGKVAALAASPASVAVDSGSELNSRSSTLSSSSMSLSPKLCAEKEAATSELQSIQRLVSGLEAKPDRSRSASP

SEQ ID NO: 15724 - protein, 545 aa, Homo Sapiens
MLQDKGLSESEEAFRAPGPALGEASAANAPEPALAAPGLSGAALGSPPGPGADVVAAAAAEQTIENIKVGLHEKELWKKFHEAGTEMIITKAGRRMFPSYKVKVTGMNPKTKYILLIDIVPADDHRYKFCDNKWMVAGKAEPAMPGRLYVHPDSPATGAHWMRQLVSFQKLKLTNNHLDPFGHIILNSMHKYQPRLHIVKADENNAFGSKNTAFCTHVFPETSFISVTSYQNHKITQLKIENNPFAKGFRGSDDSDLRVARLQSKEYPVISKSIMRQRLISPQLSATPDVGPLLGTHQALQHYQHENGAHSQLAEPQDLPLSTFPTQRDSSLFYHCLKRRDGTRHLDLPCKRSYLEAPSSVGEDHYFRSPPPYDQQMLSPSYCSEVTPREACMYSGSGPEIAGVSGVDDLPPPPLSCNMWTSVSPYTSYSVQTMETVPYQPFPTHFTATTMMPRLPTLSAQSSQPPGNAHFSVYNQLSQSQVRERGPSASFPRERGLPQGCERKPPSPHLNAANEFLYSQTFSLSRESSLQYHSGMGTVENWTDG

SEQ ID NO: 15725 - protein, 518 aa, Homo Sapiens
MADADEGFGLAHTPLEPDAKDLPCDSKPESALGAPSKSPSSPQAAFTQQGMEGIKVFLHERELWLKFHEVGTEMIITKAGRRMFPSYKVKVTGLNPKTKYILLMDIVPADDHRYKFADNKWSVTGKAEPAMPGRLYVHPDSPATGAHWMRQLVSFQKLKLTNNHLDPFGHIILNSMHKYQPRLHIVKADENNGFGSKNTAFCTHVFPETAFIAVTSYQNHKITQLKIENNPFAKGFRGSDDMELHRMSRMQSKEYPVVPRSTVRQKVASNHSPFSSESRALSTSSNLGSQYQCENGVSGPSQDLLPPPNPYPLPQEHSQIYHCTKRKEEECSTTDHPYKKPYMETSPSEEDSFYRSSYPQQQGLGASYRTESAQRQACMYASSAPPSEPVPSLEDISCNTWPSMPSYSSCTVTTVQPMDRLPYQHFSAHFTSGPLVPRLAGMANHGSPQLGEGMFQHQTSVAHQPVVRQCGPQTGLQSPGTLQPPEFLYSHGVPRTLSPHQYHSVHGVGMVPEWSDNS

SEQ ID NO: 15726 - protein, 436 aa, Homo Sapiens
MYHPRELYPSLGAGYRLGPAQPGADSSFPPALAEGYRYPELDTPKLDCFLSGMEAAPRTLAAHPPLPLLPPAMGTEPAPSAPEALHSLPGVSLSLENRELWKEFSSVGTEMIITKAGRRMFPACRVSVTGLDPEARYLFLLDVIPVDGARYRWQGRRWEPSGKAEPRLPDRVYIHPDSPATGAHWMRQPVSFHRVKLTNSTLDPHGHLILHSMHKYQPRIHLVRAAQLCSQHWGGMASFRFPETTFISVTAYQNPQITQLKIAANPFAKGFRENGRNCKRERDARVKRKLRGPEPAATEAYGSGDTPGGPCDSTLGGDIRESDPEQAPAPGEATAAPAPLCGGPSAEAYLLHPAAFHGAPSHLPTRSPSFPEAPDSGRSAPYSAAFLELPHGSGGSGYPAAPPAVPFAPHFLQGGPFPLPYTAPGGYLDVGSKPMY

SEQ ID NO: 15727 - protein, 682 aa, Homo Sapiens; identical to SEQ ID NO: 13041

SEQ ID NO: 15728 - protein, 199 aa, Homo Sapiens
MAFALLRPVGAHVLYPDVRLLSEDEENRSESDASDQSFGCCEGPEAARRGPGPGGGRRAGGGGGAGPVVVVRQRQAANARERDRTQSVNTAFTALRTLIPTEPVDRKLSKIETVRLASSYIAHLANVLLLGDSADDGQPCFRAAGSAKGAVPAAADGGRQPRSICTFCLSNQRKGGGRRDLGGSCLKVRGVAPLRGPRR

SEQ ID NO: 15729 - protein, 345 aa, Homo Sapiens
MLPCFQLLRIGGGRGGDLYTFHPPAGAGCTYRLGHRADLCDVALRPQQEPGLISGIHAELHAEPRGDDWRVSLEDHSSQGTLVNNVRLPRGHRLELSDGDLLTFGPEGPPGTSPSEFYFMFQQVRVKPQDFAAITIPRSRGEARVGAGFRPMLPSQGAPQRPLSTFSPAPKATLILNSIGSLSKLRPQPLTFSPSWGGPKSLPVPAPPGEMGTTPSAPPQRNRRKSVHRVLAELDDESEPPENPPPVLMEPRKKLRVDKAPLTPTGNRRGRPRKYPVSAPMAPPAVGGGEPCAAPCCCLPQEETVAWVQCDGCDVWFHVACVGCSIQAAREADFRCPGCRAGIQT

SEQ ID NO: 15730 - protein, 1960 aa, Homo Sapiens [sequence omitted]

SEQ ID NO: 15731 - protein, 179 aa, Homo Sapiens
MSTGSLSDVEDLQEVEMLECDGLKMDSNKEFVTSNESTEESSNCENGSPQKGRGGLGKRRKAPTKKSPLSGVSQEGKQVQRNAANARERARMRVLSKAFSRLKTTLPWVPPDTKLSKLDTLRLASSYIAHLRQILANDKYENGYIHPVNLTWPFMVAGKPESDLKEVVTASRLCGTTAS

SEQ ID NO: 15732 - protein, 214 aa, Homo Sapiens
MSQRKARGPPAMPGVGHSQTQAKARLLPGADRKRSRLSRTRQDPWEERSWSNQRWSRATPGPRGTRAGGLALGRSEASPENAARERSRVRTLRQAFLALQAALPAVPPDTKLSKLDVLVLAASYIAHLTRTLGHELPGPAWPPFLRGLRYLHPLKKWPMRSRLYAGGLGYSDLDSTTASTPSQRTRDAEVGSQVPGEADALLSTTPLSPALGDK

SEQ ID NO: 15733 - protein, 167 aa, Homo Sapiens
MDRGRPAGSPLSASAEPAPLAAAIRDSRPGRTGPGPAGPGGGSRSGSGRPAAANAARERSRVQTLRHAFLELQRTLPSVPPDTKLSKLDVLLLATTYIAHLTRSLQDDAEAPADAGLGALRGDGYLHPVKKWPMRSRLYIGATGQFLKHSVSGEKTNHDNTPTDSQP

SEQ ID NO: 15734 - protein, 676 aa, Homo Sapiens
MSRRALRRLRGEQRGQEPLGPGALHFDLRDDDDAEEEGPKRELGVRRPGGAGKEGVRVNNRFELINIDDLEDDPVVNGERSGCALTDAVAPGNKGRGQRGNTESKTDGDDTETVPSEQSHASGKLRKKKKKQKNKKSSTGEASENGLEDIDRILERIEDSTGLNRPGPAPLSSRKHVLYVEHRHLNPDTELKRYFGARAILGEQRPRQRQRVYPKCTWLTTPKSTWPRYSKPGLSMRLLESKKGLSFFAFEHSEEYQQAQHKFLVAVESMEPNNIVVLLQTSPYHVDSLLQLSDACRFQEDQEMARDLVERALYSMECAFHPLFSLTSGACRLDYRRPENRSFYLALYKQMSFLEKRGCPRTALEYCKLILSLEPDEDPLCMLLLIDHLALRARNYEYLIRLFQEWEAHRNLSQLPNFAFSVPLAYFLLSQQTDLPECEQSSARQKASLLIQQALTMFPGVLLPLLESCSVRPDASVSSHRFFGPNAEISQPPALSQLVNLYLGRSHFLWKEPATMSWLEENVHEVLQAVDAGDPAVEACENRRKVLYQRAPRNIHRHVILSEIKEAVAALPPDVTTQSVMGFDPLPPSDTIYSYVRPERLSPISHGNTIALFFRSLLPNYTMEGERPEEGVAGGLNRNQGLNRLMLAVRDMMANFHLNDLEAPHEDDAEGEGEWD

SEQ ID NO: 15735 - protein, 654 aa, Homo Sapiens
MNQPQRMAPVGTDKELSDLLDFSMMFPLPVTNGKGRPASLAGAQFGGSGLEDRPSSGSWGSGDQSSSSFDPSRTFSEGTHFTESHSSLSSSTFLGPGLGGKSGERGAYASFGRDAGVGGLTQAGFLSGELALNSPGPLSPSGMKGTSQYYPSYSGSSRRRAADGSLDTQPKKVRKVPPGLPSSVYPPSSGEDYGRDATAYPSAKTPSSTYPAPFYVADGSLHPSAELWSPPGQAGFGPMLGGGSSPLPLPPGSGPVGSSGSSSTFGGLHQHERMGYQLHGAEVNGGLPSASSFSSAPGATYGGVSSHTPPVSGADSLLGSRGTTAGSSGDALGKALASIYSPDHSSNNFSSSPSTPVGSPQGLAGTSQWPRAGAPGALSPSYDGGLHGLQSKIEDHLDEAIHVLRSHAVGTAGDMHTLLPGHGALASGFTGPMSLGGRHAGLVGGSHPEDGLAGSTSLMHNHAALPSQPGTLPDLSRPPDSYSGLGRAGATAAASEIKREEKEDEENTSAADHSEEEKKELKAPRARTSPDEDEDDLLPPEQKAEREKERRVANNARERLRVRDINEAFKELGRMCQLHLNSEKPQTKLLILHQAVSVILNLEQQVRERNLNPKAACLKRREEEKVSGVVGDPQMVLSAPHPGLSEAHNPAGHM

SEQ ID NO: 15736 - protein, 667 aa, Homo Sapiens
MHHQQRMAALGTDKELSDLLDFSAMFSPPVSSGKNGPTSLASGHFTGSNVEDRSSSGSWGNGGHPSPSRNYGDGTPYDHMTSRDLGSHDNLSPPFVNSRIQSKTERGSYSSYGRESNLQGCHQQSLLGGDMDMGNPGTLSPTKPGSQYYQYSSNNPRRRPLHSSAMEVQTKKVRKVPPGLPSSVYAPSASTADYNRDSPGYPSSKPATSTFPSSFFMQDGHHSSDPWSSSSGMNQPGYAGMLGNSSHIPQSSSYCSLHPHERLSYPSHSSADINSSLPPMSTFHRSGTNHYSTSSCTPPANGTDSIMANRGSGAAGSSQTGDALGKALASIYSPDHTNNSFSSNPSTPVGSPPSLSAGTAVWSRNGGQASSSPNYEGPLHSLQSRIEDRLERLDDAIHVLRNHAVGPSTAMPGGHGDMHGIIGPSHNGAMGGLGSGYGTGLLSANRHSLMVGTHREDGVALRGSHSLLPNQVPVPQLPVQSATSPDLNPPQDPYRGMPPGLQGQSVSSGSSEIKSDDEGDENLQDTKSSEDKKLDDDKKDIKSITSNNDDEDLTPEQKAEREKERRMANNARERLRVRDINEAFKELGRMVQLHLKSDKPQTKLLILHQAVAVILSLEQQVRERNLNPKAACLKRREEEKVSSEPPPLSLAGPHPGMGDASNHMGQM

SEQ ID NO: 15737 - protein, 384 aa, Homo Sapiens
MPQLDSGGGGAGGGDDLGAPDELLAFQDEGEEQDDKSRDSAAGPERDLAELKSSLVNESEGAAGGAGIPGVPGAGAGARGEAEALGREHAAQRLFPDKLPEPLEDGLKAPECTSGMYKETVYSAFNLLMHYPPPSGAGQHPQPQPPLHKANQPPHGVPQLSLYEHFNSPHPTPAPADISQKQVHRPLQTPDLSGFYSLTSGSMGQLPHTVSWFTHPSLMLGSGVPGHPAAIPHPAIVPPSGKQELQPFDRNLKTQAESKAEKEAKKPTIKKPLNAFMLYMKEMRAKVIAECTLKESAAINQILGRRWHALSREEQAKYYELARKERQLHMQLYPGWSARDNYGKKKRRSREKHQESTTETNWPRELKDGNGQESLSMSSSSSPA

SEQ ID NO: 15738 - protein, 588 aa, Homo Sapiens
MPQLGGGGGGGGGGSGGGGGSSAGAAGGGDDLGANDELIPFQDEGGEEQEPSSDSASAQRDLDEVKSSLVNESENQSSSSDSEAERRPQPVRDTFQKPRDYFAEVRRPQDSAFFKGPPYPGYPFLMIPDLSSPYLSNGPLSPGGARTYLQMKWPLLDVPSSATVKDTRSPSPAHLSNKVPVVQHPHHMHPLTPLITYSNDHFSPGSPPTHLSPEIDPKTGIPRPPHPSELSPYYPLSPGAVGQIPHPLGWLVPQQGQPMYSLPPGGFRHPYPALAMNASMSSLVSSRFSPHMVAPAHPGLPTSGIPHPAIVSPIVKQEPAPPSLSPAVSVKSPVTVKKEEEKKPHVKKPLNAFMLYMKEMRAKVVAECTLKESAAINQILGRKWHNLSREEQAKYYELARKERQLHSQLYPTWSARDNYGKKKKRKREKQLSQTQSQQQVQEAEGALASKSKKPCVQYLPPEKPCDSPASSHGSMLDSPATPSAALASPAAPAATHSEQAQPLSLTTKPETRAQLALHSAAFLSAKAAASSSGQMGSQPPLLSRPLPLGSMPTALLASPPSFPATLHAHQALPVLQAQPLSLVTKSAH

SEQ ID NO: 15739 - protein, 619 aa, Homo Sapiens
MPQLNGGGGDDLGANDELISFKDEGEQEEKSSENSSAERDLADVKSSLVNESETNQNSSSDSEAERRPPPRSESFRDKSRESLEEAAKRQDGGLFKGPPYPGYPFIMIPDLTSPYLPNGSLSPTARTLHFQSGSTHYSAYKTIEHQIAVQYLQMKWPLLDVQAGSLQSRQALKDARSPSPAHIVSNKVPVVQHPHHVHPLTPLITYSNEHFTPGNPPPHLPADVDPKTGIPRPPHPPDISPYYPLSPGTVGQIPHPLGWLVPQQGQPVYPITTGGFRHPYPTALTVNASMSRFPPHMVPPHHTLHTTGIPHPAIVTPTVKQESSQSDVGSLHSSKHQDSKKEEEKKKPHIKKPLNAFMLYMKEMRAKVVAECTLKESAAINQILGRRWHALSREEQAKYYELARKERQLHMQLYPGWSARDNYGKKKKRKRDKQPGETNEHSECFLNPCLSLPPITDLSAPKKCRARFGLDQQNNWCGPCRRKKKCVRYIQGEGSCLSPPSSDGSLLDSPPPSPNLLGSPPRDAKSQTEQTQPLSLSLKPDPLAHLSMMPPPPALLLAEATHKASALCPNGALDLPPAALQPAAPSSSIAQPSTSSLHSHSSLAGTQPQPLSLVTKSLE

SEQ ID NO: 15740 - protein, 500 aa, Homo Sapiens
MSGPGPREPPPEAGAAGGEAAVEGAGGGDAALGEPGLSFTTTDLSLVEMTEVEYTQLQHILCSHMEAAADGELETRLNSALLAAAGPGAGAGGFAAGGQGGAAPVYPVLCPSALAADAPCLGHIDFQELRMMLLSEAGAAEKTSGGGDGARARADGAAKEGAGAAAAAAGPDGAPEARAKPAVRVRLEDRFNSIPAEPPPAPRGPEPPEPGGALNNLVTLIRHPSELMNVPLQQQNKCTALVKNKTAATTTALQFTYPLFTTNACSTSGNSNLSQTQSSSNSCSVLEAAKHQDIGLPRAFSFCYQQEIESTKQTLGSRNKVLPEQVWIKVGEAALCKQALKRNRSRMRQLDTNVERRALGEIQNVGEGATATQGAWQSSESSQANLGEQAQSGPQGGRSQRRERHNRMERDRRRRIRICCDELNLLVPFCNAETDKATTLQWTTAFLKYIQERHGDSLKKEFESVFCGKTGRRLKLTRPDSLVTCPAQGSLQSSPSMEIK

SEQ ID NO: 15741 - protein, 426 aa, Homo Sapiens
MEPSSWSGSESPAENMERMSDSADKPIDNDAEGVWSPDIEQSFQEALAIYPPCGRRKIILSDEGKMYGRNELIARYIKLRTGKTRTRKQVSSHIQVLARRKSRDFHSKLKDQTAKDKALQHMAAMSSAQIVSATAIHNKLGLPGIPRPTFPGAPGFWPGMIQTGQPGSSQDVKPFVQQAYPIQPAVTAPIPGFEPASAPAPSVPAWQGRSIGTTKLRLVEFSAFLEQQRDPDSYNKHLFVHIGHANHSYSDPLLESVDIRQIYDKFPEKKGGLKELFGKGPQNAFFLVKFWADLNCNIQDDAGAFYGVTSQYESSENMTVTCSTKVCSFGKQVVEKVETEYARFENGRFVYRINRSPMCEYMINFIHKLKHLPEKYMMNSVLENFTILLVVTNRDTQETLLCMACVFEVSNSEHGAQHHIYRLVKD

SEQ ID NO: 15742 - protein, 447 aa, Homo Sapiens
MGEPRAGAALDDGSGWTGSEEGSEEGTGGSEGAGGDGGPDAEGVWSPDIEQSFQEALAIYPPCGRRKIILSDEGKMYGRNELIARYIKLRTGKTRTRKQVSSHIQVLARRKSREIQSKLKDQVSKDKAFQTMATMSSAQLISAPSLQAKLGPTGPQASELFQFWSGGSGPPWNVPDVKPFSQTPFTLSLTPPSTDLPGYEPPQALSPLPPPTPSPPAWQARGLGTARLQLVEFSAFVEPPDAVDSYQRHLFVHISQHCPSPGAPPLESVDVRQIYDKFPEKKGGLRELYDRGPPHAFFLVKFWADLNWGPSGEEAGAGGSISSGGFYGVSSQYESLEHMTLTCSSKVCSFGKQVVEKVETERAQLEDGRFVYRLLRSPMCEYLVNFLHKLRQLPERYMMNSVLENFTILQVVTNRDTQELLLCTAYVFEVSTSERGAQHHIYRLVRD

SEQ ID NO: 15743 - protein, 435 aa, Homo Sapiens
MASNSWNASSSPGEAREDGPEGLDKGLDNDAEGVWSPDIEQSFQEALAIYPPCGRRKIILSDEGKMYGRNELIARYIKLRTGKTRTRKQVSSHIQVLARKKVREYQVGIKAMNLDQVSKDKALQSMASMSSAQIVSASVLQNKFSPPSPLPQAVFSTSSRFWSSPPLLGQQPGPSQDIKPFAQPAYPIQPPLPPTLSSYEPLAPLPSAAASVPVWQDRTIASSRLRLLEYSAFMEVQRDPDTYSKHLFVHIGQTNPAFSDPPLEAVDVRQIYDKFPEKKGGLKELYEKGPPNAFFLVKFWADLNSTIQEGPGAFYGVSSQYSSADSMTISVSTKVCSFGKQVVEKVETEYARLENGRFVYRIHRSPMCEYMINFIHKLKHLPEKYMMNSVLENFTILQVVTSRDSQETLLVIAFVFEVSTSEHGAQHHVYKLVKD

SEQ ID NO: 15744 - protein, 434 aa, Homo Sapiens
MEGTAGTITSNEWSSPTSPEGSTASGGSQALDKPIDNDAEGVWSPDIEQSFQEALAIYPPCGRRKIILSDEGKMYGRNELIARYIKLRTGKTRTRKQVSSHIQVLARRKAREIQAKLKDQAAKDKALQSMAAMSSAQIISATAFHSSMALARGPGRPAVSGFWQGALPGQAGTSHDVKPFSQQTYAVQPPLPLPGFESPAGPAPSPSAPPAPPWQGRSVASSKLWMLEFSAFLEQQQDPDTYNKHLFVHIGQSSPSYSDPYLEAVDIRQIYDKFPEKKGGLKDLFERGPSNAFFLVKFWADLNTNIEDEGSSFYGVSSQYESPENMIITCSTKVCSFGKQVVEKVETEYARYENGHYSYRIHRSPLCEYMINFIHKLKHLPEKYMMNSVLENFTILQVVTNRDTQETLLCIAYVFEVSASEHGAQHHIYRLVKE

SEQ ID NO: 15745 - protein, 303 aa, Homo Sapiens
MSDAGGGKKPPVDPQAGPGPGPGRAAGERGLSGSFPLVLKKLMENPPREARLDKEKGKEKLEEDEAAAASTMAVSASLMPPIWDKTIPYDGESFHLEYMDLDEFLLENGIPASPTHLAHNLLLPVAELEGKESASSSTASPPSSSTAIFQPSETVSSTESSLEKERETPSPIDPNCVEVDVNFNPDPADLVLSSVPGGELFNPRKHKFAEEDLKPQPMIKKAKKVFVPDEQKDEKYWTRRKKNNVAAKRSRDARRLKENQITIRAAFLEKENTALRTEVAELRKEVGKCKTIVSKYETKYGPL

SEQ ID NO: 15746 - protein, 439 aa, Homo Sapiens
MAEDVSSAAPSPRGCADGRDADPTEEQMAETERNDEEQFECQELLECQVQVGAPEEEEEEEEDAGLVAEAEAVAAGWMLDFLCLSLCRAFRDGRSEDFRRTRNSAEAIIHGLSSLTACQLRTIYICQFLTRIAAGKTLDAQFENDERITPLESALMIWGSIEKEHDKLHEEIQNLIKIQAIAVCMENGNFKEAEEVFERIFGDPNSHMPFKSKLLMIISQKDTFHSFFQHFSYNHMMEKIKSYVNYVLSEKSSTFLMKAAAKVVESKRTRTITSQDKPSGNDVEMETEANLDTRKSVSDKQSAVTESSEGTVSLLRSHKNLFLSKLQHGTQQQDLNKKERRVGTPQSTKKKKESRRATESRIPVSKSQPVTPEKHRARKRQAWLWEEDKNLRSGVRKYGEGNWSKILLHYKFNNRTSVMLKDRWRTMKKLKLISSDSED

SEQ ID NO: 15747 - protein, 542 aa, Homo Sapiens
MAAGAGTAGPASGPGVVRDPAASQPRKRPGREGGEGARRSDTMAGGGGSSDGSGRAAGRRASRSSGRARRGRHEPGLGGPAERGAGEARLEEAVNRWVLKFYFHEALRAFRGSRYGDFRQIRDIMQALLVRPLGKEHTVSRLLRVMQCLSRIEEGENLDCSFDMEAELTPLESAINVLEMIKTEFTLTEAVVESSRKLVKEAAVIICIKNKEFEKASKILKKHMSKDPTTQKLRNDLLNIIREKNLAHPVIQNFSYETFQQKMLRFLESHLDDAEPYLLTMAKKALKSESAASSTGKEDKQPAPGPVEKPPREPARQLRNPPTTIGMMTLKAAFKTLSGAQDSEAAFAKLDQKDLVLPTQALPASPALKNKRPRKDENESSAPADGEGGSELQPKNKRMTISRLVLEEDSQSTEPSAGLNSSQEAASAPPSKPTVLNQPLPGEKNPKVPKGKWNSSNGVEEKETWVEEDELFQVQAAPDEDSTTNITKKQKWTVEESEWVKAGVQKYGEGNWAAISKNYPFVNRTAVMIKDRWRTMKRLGMN

SEQ ID NO: 15748 - protein, 2136 aa, Homo Sapiens
MSRSRHARPSRLVRKEDVNKKKKNSQLRKTTKGANKNVASVKTLSPGKLKQLIQERDVKKKTEPKPPVPVRSLLTRAGAARMNLDRTEVLFQNPESLTCNGFTMALRSTSLSRRLSQPPLVVAKSKKVPLSKGLEKQHDCDYKILPALGVKHSENDSVPMQDTQVLPDIETLIGVQNPSLLKGKSQETTQFWSQRVEDSKINIPTHSGPAAEILPGPLEGTRCGEGLFSEETLNDTSGSPKMFAQDTVCAPFPQRATPKVTSQGNPSIQLEELGSRVESLKLSDSYLDPIKSEHDCYPTSSLNKVIPDLNLRNCLALGGSTSPTSVIKFLLAGSKQATLGAKPDHQEAFEATANQQEVSDTTSFLGQAFGAIPHQWELPGADPVHGEALGETPDLPEIPGAIPVQGEVFGTILDQQETLGMSGSVVPDLPVFLPVPPNPIATFNAPSKWPEPQSTVSYGLAVQGAIQILPLGSGHTPQSSSNSEKNSLPPVMAISNVENEKQVHISFLPANTQGFPLAPERGLFHASLGIAQLSQAGPSKSDRGSSQVSVTSTVHVVNTTVVTMPVPMVSTSSSSYTTLLPTLEKKKRKRCGVCEPCQQKTNCGECTYCKNRKNSHQICKKRKCEELKKKPSVVVPLEVIKENKRPQREKKPKVLKADFDNKPVNGPKSESMDYSRCGHGEEQKLELNPHTVENVTKNEDSMTGIEVEKWTQNKKSQLTDHVKGDFSANVPEAEKSKNSEVDKKRTKSPKLFVQTVRNGIKHVHCLPAETNVSFKKFNIEEFGKTLENNSYKFLKDTANHKNAMSSVATDMSCDHLKGRSNVLVFQQPGFNCSSIPHSSHSIINHHASIHNEGDQPKTPENIPSKEPKDGSPVQPSLLSLMKDRRLTLEQVVAIEALTQLSEAPSENSSPSKSEKDEESEQRTASLLNSCKAILYTVRKDLQDPNLQGEPPKLNHCPSLEKQSSCNTVVFNGQTTTLSNSHINSATNQASTKSHEYSKVTNSLSLFIPKSNSSKIDTNKSIAQGIITLDNCSNDLHQLPPRNNEVEYCNQLLDSSKKLDSDDLSCQDATHTQIEEDVATQLTQLASIIKINYIKPEDKKVESTPTSLVTCNVQQKYNQEKGTIQQKPPSSVHNNHGSSLTKQKNPTQKKTKSTPSRDRRKKKPTVVSYQENDRQKWEKLSYMYGTICDIWIASKFQNFGQFCPHDFPTVFGKISSSTKIWKPLAQTRSIMQPKTVFPPLTQIKLQRYPESAEEKVKVEPLDSLSLFHLKTESNGKAFTDKAYNSQVQLTVNANQKAHPLTQPSSPPNQCANVMAGDDQIRFQQVVKEQLMHQRLPTLPGISHETPLPESALTLRNVNVVCSGGITVVSTKSEEEVCSSSFGTSEFSTVDSAQKNFNDYAMNFFTNPTKNLVSITKDSELPTCSCLDRVIQKDKGPYYTHLGAGPSVAAVREIMENRYGQKGNAIRIEIVVYTGKEGKSSHGCPIAKWVLRRSSDEEKVLCLVRQRTGHHCPTAVMVVLIMVWDGIPLPMADRLYTELTENLKSYNGHPTDRRCTLNENRTCTCQGIDPETCGASFSFGCSWSMYFNGCKFGRSPSPRRFRIDPSSPLHEKNLEDNLQSLATRLAPIYKQYAPVAYQNQVEYENVARECRLGSKEGRPFSGVTACLDFCAHPHRDIHNMNNGSTVVCTLTREDNRSLGVIPQDEQLHVLPLYKLSDTDEFGSKEGMEAKIKSGAIEVLAPRRKKRTCFTQPVPRSGKKRAAMMTEVLAHKIRAVEKKPIPRIKRKNNSTTTNNSKPSSLPTLGSNTETVQPEVKSETEPHFILKSSDNTKTYSLMPSAPHPVKEASPGFSWSPKTASATPAPLKNDATASCGFSERSSTPHCTMPSGRLSGANAAAADGPGISQLGEVAPLPTLSAPVMEPLINSEPSTGVTEPLTPHQPNHQPSFLTSPQDLASSPMEEDEQHSEADEPPSDEPLSDDPLSPAEEKLPHIDEYWSDSEHIFLDANIGGVAIAPAHGSVLIECARRELHATTPVEHPNRNHPTRLSLVFYQHKNLNKPQHGFELNKIKFEAKEAKNKKMKASEQKDQAANEGPEQSSEVNELNQIPSHKALTLTHDNVVTVSPYALTHVAGPYNHWV

SEQ ID NO: 15749 - protein, 2002 aa, Homo Sapiens
MEQDRTNHVEGNRLSPFLIPSPPICQTEPLATKLQNGSPLPERAHPEVNGDTKWHSFKSYYGIPCMKGSQNSRVSPDFTQESRGYSKCLQNGGIKRTVSEPSLSGLLQIKKLKQDQKANGERRNFGVSQERNPGESSQPNVSDLSDKKESVSSVAQENAVKDFTSFSTHNCSGPENPELQILNEQEGKSANYHDKNIVLLKNKAVLMPNGATVSASSVEHTHGELLEKTLSQYYPDCVSIAVQKTTSHINAINSQATNELSCEITHPSHTSGQINSAQTSNSELPPKPAAVVSEACDADDADNASKLAAMLNTCSFQKPEQLQQQKSVFEICPSPAENNIQGTTKLASGEEFCSGSSSNLQAPGGSSERYLKQNEMNGAYFKQSSVFTKDSFSATTTPPPPSQLLLSPPPPLPQVPQLPSEGKSTLNGGVLEEHHHYPNQSNTTLLREVKIEGKPEAPPSQSPNPSTHVCSPSPMLSERPQNNCVNRNDIQTAGTMTVPLCSEKTRPMSEHLKHNPPIFGSSGELQDNCQQLMRNKEQEILKGRDKEQTRDLVPPTQHYLKPGWIELKAPRFHQAESHLKRNEASLPSILQYQPNLSNQMTSKQYTGNSNMPGGLPRQAYTQKTTQLEHKSQMYQVEMNQGQSQGTVDQHLQFQKPSHQVHFSKTDHLPKAHVQSLCGTRFHFQQRADSQTEKLMSPVLKQHLNQQASETEPFSNSHLLQHKPHKQAAQTQPSQSSHLPQNQQQQQKLQIKNKEEILQTFPHPQSNNDQQREGSFFGQTKVEECFHGENQYSKSSEFETHNVQMGLEEVQNINRRNSPYSQTMKSSACKIQVSCSNNTHLVSENKEQTTHPELFAGNKTQNLHHMQYFPNNVIPKQDLLHRCFQEQEQKSQQASVLQGYKNRNQDMSGQQAAQLAQQRYLIHNHANVFPVPDQGGSHTQTPPQKDTQKHAALRWHLLQKQEQQQTQQPQTESCHSQMHRPIKVEPGCKPHACMHTAPPENKTWKKVTKQENPPASCDNVQQKSIIETMEQHLKQFHAKSLFDHKALTLKSQKQVKVEMSGPVTVLTRQTTAAELDSHTPALEQQTTSSEKTPTKRTAASVLNNFIESPSKLLDTPIKNLLDTPVKTQYDFPSCRCVEQIIEKDEGPFYTHLGAGPNVAAIREIMEERFGQKGKAIRIERVIYTGKEGKSSQGCPIAKWVVRRSSSEEKLLCLVRERAGHTCEAAVIVILILVWEGIPLSLADKLYSELTETLRKYGTLTNRRCALNEERTCACQGLDPETCGASFSFGCSWSMYYNGCKFARSKIPRKFKLLGDDPKEEEKLESHLQNLSTLMAPTYKKLAPDAYNNQIEYEHRAPECRLGLKEGRPFSGVTACLDFCAHAHRDLHNMQNGSTLVCTLTREDNREFGGKPEDEQLHVLPLYKVSDVDEFGSVEAQEEKKRSGAIQVLSSFRRKVRMLAEPVKTCRQRKLEAKKAAAEKLSSLENSSNKNEKEKSAPSRTKQTENASQAKQLAELLRLSGPVMQQSQQPQPLQKQPPQPQQQQRPQQQQPHHPQTESVNSYSASGSTNPYMRRPNPVSPYPNSSHTSDIYGSTSPMNFYSTSSQAAGSYLNSSNPMNPYPGLLNQNTQYPSYQCNGNLSVDNCSPYLGSYSPQSQPMDLYRYPSQDPLSKLSLPPIHTLYQPRFGNSQSFTSKYLGYGNQNMQGDGFSSCTIRPNVHHVGKLPPYPTHEMDGHFMGATSRLPPNLSNPNMDYKNGEHHSPSHIIHNYSAAPGMFNSSLHALHLQNKENDMLSHTANGLSKMLPALNHDRTACVQGGLHKLSDANGQEKQPLALVQGVASGAEDNDEVWSDSEQSFLDPDIGGVAVAPTHGSILIECAKRELHATTPLKNPNRNHPTRISLVFYQHKSMNEPKHGLALWEAKMAEKAREKEEECEKYGPDYVPQKSHGKKVKREPAEPHETSEPTYLRFIKSLAERTMSVTTDSTVTTSPYAFTRVTGPYNRYI

SEQ ID NO: 15750 - protein, 1660 aa, Homo Sapiens
MDSGPVYHGDSRQLSASGVPVNGAREPAGPSLLGTGGPWRVDQKPDWEAAPGPAHTARLEDAHDLVAFSAVAEAVSSYGALSTRLYETFNREMSREAGNNSRGPRPGPEGCSAGSEDLDTLQTALALARHGMKPPNCNCDGPECPDYLEWLEGKIKSVVMEGGEERPRLPGPLPPGEAGLPAPSTRPLLSSEVPQISPQEGLPLSQSALSIAKEKNISLQTAIAIEALTQLSSALPQPSHSTPQASCPLPEALSPPAPFRSPQSYLRAPSWPVVPPEEHSSFAPDSSAFPPATPRTEFPEAWGTDTPPATPRSSWPMPRPSPDPMAELEQLLGSASDYIQSVFKRPEALPTKPKVKVEAPSSSPAPAPSPVLQREAPTPSSEPDTHQKAQTALQQHLHHKRSLFLEQVHDTSFPAPSEPSAPGWWPPPSSPVPRLPDRPPKEKKKKLPTPAGGPVGTEKAAPGIKPSVRKPIQIKKSRPREAQPLFPPVRQIVLEGLRSPASQEVQAHPPAPLPASQGSAVPLPPEPSLALFAPSPSRDSLLPPTQEMRSPSPMTALQPGSTGPLPPADDKLEELIRQFEAEFGDSFGLPGPPSVPIQDPENQQTCLPAPESPFATRSPKQIKIESSGAVTVLSTTCFHSEEGGQEATPTKAENPLTPTLSGFLESPLKYLDTPTKSLLDTPAKRAQAEFPTCDCVEQIVEKDEGPYYTHLGSGPTVASIRELMEERYGEKGKAIRIEKVIYTGKEGKSSRGCPIAKWVIRRHTLEEKLLCLVRHRAGHHCQNAVIVILILAWEGIPRSLGDTLYQELTDTLRKYGNPTSRRCGLNDDRTCACQGKDPNTCGASFSFGCSWSMYFNGCKYARSKTPRKFRLAGDNPKEEEVLRKSFQDLATEVAPLYKRLAPQAYQNQVTNEEIAIDCRLGLKEGRPFAGVTACMDFCAHAHKDQHNLYNGCTVVCTLTKEDNRCVGKIPEDEQLHVLPLYKMANTDEFGSEENQNAKVGSGAIQVLTAFPREVRRLPEPAKSCRQRQLEARKAAAEKKKIQKEKLSTPEKIKQEALELAGITSDPGLSLKGGLSQQGLKPSLKVEPQNHFSSFKYSGNAVVESYSVLGNCRPSDPYSMNSVYSYHSYYAQPSLTSVNGFHSKYALPSFSYYGFPSSNPVFPSQFLGPGAWGHSGSSGSFEKKPDLHALHNSLSPAYGGAEFAELPSQAVPTDAHHPTPHHQQPAYPGPKEYLLPKAPLLHSVSRDPSPFAQSSNCYNRSIKQEPVDPLTQAEPVPRDAGKMGKTPLSEVSQNGGPSHLWGQYSGGPSMSPKRTNGVGGSWGVFSSGESPAIVPDKLSSFGASCLAPSHFTDGQWGLFPGEGQQAASHSGGRLRGKPWSPCKFGNSTSALAGPSLTEKPWALGAGDFNSALKGSPGFQDKLWNPMKGEEGRIPAAGASQLDRAWQSFGLPLGSSEKLFGALKSEEKLWDPFSLEEGPAEEPPSKGAVKEEKGGGGAEEEEEELWSDSEHNFLDENIGGVAVAPAHGSILIECARRELHATTPLKKPNRCHPTRISLVFYQHKNLNQPNHGLALWEAKMKQLAERARARQEEAARLGLGQQEAKLYGKKRKWGGTVVAEPQQKEKKGVVPTRQALAVPTDSAVTVSSYAYTKVTGPYSRWI

SEQ ID NO: 15751 - protein, 246 aa, Homo Sapiens; identical to SEQ ID NO: 13129

SEQ ID NO: 15752 - protein, 437 aa, Homo Sapiens
MLWKLTDNIKYEDCEDRHDGTSNGTARLPQLGTVGQSPYTSAPPLSHTPNADFQPPYFPPPYQPIYPQSQDPYSHVNDPYSLNPLHAQPQPQHPGWPGQRQSQESGLLHTHRGLPHQLSGLDPRRDYRRHEDLLHGPHALSSGLGDLSIHSLPHAIEEVPHVEDPGINIPDQTVIKKGPVSLSKSNSNAVSAIPINKDNLFGGVVNPNEVFCSVPGRLSLLSSTSKYKVTVAEVQRRLSPPECLNASLLGGVLRRAKSKNGGRSLREKLDKIGLNLPAGRRKAANVTLLTSLVEGEAVHLARDFGYVCETEFPAKAVAEFLNRQHSDPNEQVTRKNMLLATKQICKEFTDLLAQDRSPLGNSRPNPILEPGIQSCLTHFNLISHGFGSPAVCAAVTALQNYLTEALKAMDKMYLSNNPNSHTDNNAKSSDKEEKHRK

SEQ ID NO: 15753 - protein, 460 aa, Homo Sapiens
MHSPPRDQAAIMLWKLVENVKYEDIYEDRHDGVPSHSSRLSQLGSVSQGPYSSAPPLSHTPSSDFQPPYFPPPYQPLPYHQSQDPYSHVNDPYSLNPLHQPQQHPWGQRQRQEVGSEAGSLLPQPRAALPQLSGLDPRRDYHSVRRPDVLLHSAHHGLDAGMGDSLSLHGLGHPGMEDVQSVEDANNSGMNLLDQSVIKKVPVPPKSVTSLMMNKDGFLGGMSVNTGEVFCSVPGRLSLLSSTSKYKVTVGEVQRRLSPPECLNASLLGGVLRRAKSKNGGRSLRERLEKIGLNLPAGRRKAANVTLLTSLVEGEAVHLARDFGYICETEFPAKAVSEYLNRQHTDPSDLHSRKNMLLATKQLCKEFTDLLAQDRTPIGNSRPSPILEPGIQSCLTHFSLITHGFGAPAICAALTALQNYLTEALKGMDKMFLNNTTTNRHTSGEGPGSKTGDKEEKHRK

SEQ ID NO: 15754 - protein, 450 aa, Homo Sapiens
MLWKITDNVKYEEDCEDRHDGSSNGNPRVPHLSSAGQHLYSPAPPLSHTGVAEYQPPPYFPPPYQQLAYSQSADPYSHLGEAYAAAINPLHQPAPTGSQQQAWPGRQSQEGAGLPSHHGRPAGLLPHLSGLEAGAVSARRDAYRRSDLLLPHAHALDAAGLAENLGLHDMPHQMDEVQNVDDQHLLLHDQTVIRKGPISMTKNPLNLPCQKELVGAVMNPTEVFCSVPGRLSLLSSTSKYKVTVAEVQRRLSPPECLNASLLGGVLRRAKSKNGGRSLREKLDKIGLNLPAGRRKAAHVTLLTSLVEGEAVHLARDFAYVCEAEFPSKPVAEYLTRPHLGGRNEMAARKNMLLAAQQLCKEFTELLSQDRTPHGTSRLAPVLETNIQNCLSHFSLITHGFGSQAICAAVSALQNYIKEALIVIDKSYMNPGDQSPADSNKTLEKMEKHRK

SEQ ID NO: 15755 - protein, 452 aa, Homo Sapiens
MSTTFPGLVHDAEIRHDGSNSYRLMQLGCLESVANSTVAYSSSSPLTYSTTGTEFASPYFSTNHQYTPLHHQSFHYEFQHSHPAVTPDAYSLNSLHHSQQYYQQIHHGEPTDFINLHNARALKSSCLDEQRRELGCLDAYRRHDLSLMSHGSQYGMHPDQRLLPGPSLGLAAAGADDLQGSVEAQCGLVLNGQGGVIRRGGTCVVNPTDLFCSVPGRLSLLSSTSKYKVTIAEVKRRLSPPECLNASLLGGILRRAKSKNGGRCLREKLDRLGLNLPAGRRKAANVTLLTSLVEGEALHLARDFGYTCETEFPAKAVGEHLARQHMEQKEQTARKKMILATKQICKEFQDLLSQDRSPLGSSRPTPILDLDIQRHLTHFSLITHGFGTPAICAALSTFQTVLSEMLNYLEKHTTHKNGGAADSGQGHANSEKAPLRKTSEAAVKEGKTEKTD

SEQ ID NO: 15756 - protein, 442 aa, Homo Sapiens
MLVHTYSAMERPDGLGAAAGGARLSSLPQAAYGPAPPLCHTPAATAAAEFQPPYFPPPYPQPPLPYGQAPDAAAAFPHLAGDPYGGLAPLAQPQPPQAAWAAPRAAARAHEEPPGLLAPPARALGLDPRRDYATAVPRLLHGLADGAHGLADAPLGLPGLAAAPGLEDLQAMDEPGMSLLDQSVIKKVPIPSKASSLSALSLAKDSLVGGITNPGEVFCSVPGRLSLLSSTSKYKVTVGEVQRRLSPPECLNASLLGGVLRRAKSKNGGRCLRERLEKIGLNLPAGRRKAANVTLLTSLVEGEAVHLARDFGYVCETEFPAKAAAEYLCRQHADPGELHSRKSMLLAAKQICKEFADLMAQDRSPLGNSRPALILEPGVQSCLTHFSLITHGFGGPAICAALTAFQNYLLESLKGLDKMFLSSVGSGHGETKASEKDAKHRK

SEQ ID NO: 15757 - protein, 338 aa, Homo Sapiens
MEYFMVPTQKVPSLQHFRKTEKEVIGGLCSLANIPLTPETQRDQERRIRREIANSNERRRMQSINAGFQSLKTLIPHTDGEKLSKAAILQQTAEYIFSLEQEKTRLLQQNTQLKRFIQELSGSSPKRRRAEDKDEGIGSPDIWEDEKAEDLRREMIELRQQLDKERSVRMMLEEQVRSLEAHMYPEKLKVIAQQVQLQQQQEQVRLLHQEKLEREQQQLRTQLLPPPAPTHHPTVIVPAPPPPPSHHINVVTMGPSSVINSVSTSRQNLDTIVQAIQHIEGTQEKQELEEEQRRAVIVKPVRSCPEAPTSDTASDSEASDSDAMDQSREEPSGDGELP

SEQ ID NO: 15758 - protein, 346 aa, Homo Sapiens
MAASGKLSTCRLPPLPTIREIIKLLRLQAAKQLSQNFLLDLRLTDKIVRKAGNLTNAYVYEVGPGPGGITRSILNADVAELLVVEKDTRFIPGLQMLSDAAPGKLRIVHGDVLTFKVEKAFSESLKRPWEDDPPNVHIIGNLPFSVSTPLIIKWLENISCRDGPFVYGRTQMTLTFQKEVAERLAANTGSKQRSRLSVMAQYLCNVRHIFTIPGQAFVPKPEVDVGVVHFTPLIQPKIEQPFKLVEKVVQNVFQFRRKYCHRGLRMLFPEAQRLESTGRLLELADIDPTLRPRQLSISHFKSLCDVYRKMCDEDPQLFAYNFREELKRRKSKNEEKEEDDAENYRL

SEQ ID NO: 15759 - protein, 396 aa, Homo Sapiens
MWIPVVGLPRRLRLSALAGAGRFCILGSEAATRKHLPARNHCGLSDSSPQLWPEPDFRNPPRKASKASLDFKRYVTDRRLAETLAQIYLGKPSRPPHLLLECNPGPGILTQALLEAGAKVVALESDKTFIPHLESLGKNLDGKLRVIHCDFFKLDPRSGGVIKPPAMSSRGLFKNLGIEAVPWTADIPLKVVGMFPSRGEKRALWKLAYDLYSCTSIYKFGRIEVNMFIGEKEFQKLMADPGNPDLYHVLSVIWQLACEIKVLHMEPWSSFDIYTRKGPLENPKRRELLDQLQQKLYLIQMIPRQNLFTKNLTPMNYNIFFHLLKHCFGRRSATVIDHLRSLTPLDARDILMQIGKQEDEKVVNMHPQDFKTLFETIERSKDCAYKWLYDETLEDR

SEQ ID NO: 15760 - protein, 502 aa, Homo Sapiens
MAWALKLPLADEVIESGLVQDFDASLSGIGQELGAGAYSMSDVLALPIFKQEESSLPPDNENKILPFQYVLCAATSPAVKLHDETLTYLNQGQSYEIRMLDNRKLGELPEINGKLVKSIFRVVFHDRRLQYTEHQQLEGWRWNRPGDRILDIDIPMSVGIIDPRANPTQLNTVEFLWDPAKRTSVFIQVHCISTEFTMRKHGGEKGVPFRVQIDTFKENENGEYTEHLHSASCQIKVFKPKGADRKQKTDREKMEKRTPHEKEKYQPSYETTILTECSPWPEITYVNNSPSPGFNSSHSSFSLGEGNGSPNHQPEPPPPVTDNLLPTTTPQEAQQWLHRNRFSTFTRLFTNFSGADLLKLTRDDVIQICGPADGIRLFNALKGRMVRPRLTIYVCQESLQLREQQQQQQQQQQKHEDGDSNGTFFVYHAIYLEELTAVELTEKIAQLFSISPCQISQIYKQGPTGIHVLISDEMIQNFQEEACFILDTMKAETNDSYHIILK

SEQ ID NO: 15761 - protein, 479 aa, Homo Sapiens
MLFWHTQPEHYNQHNSGSYLRDVLALPIFKQEEPQLSPENEARLPPLQYVLCAATSPAVKLHEETLTYLNQGQSYEIRLLENRKLGDFQDLNTKYVKSIIRVVFHDRRLQYTEHQQLEGWRWSRPGDRILDIDIPLSVGILDPRASPTQLNAVEFLWDPAKRASAFIQVHCISTEFTPRKHGGEKGVPFRVQIDTFKQNENGEYTEHLHSASCQIKVFKPKGADRKQKTDREKMEKRTAQEKEKYQPSYETTILTECSPWPDVAYQVNSAPSPSYNGSPNSFGLGEGNASPTHPVEALPVGSDHLLPSASIQDAQQWLHRNRFSQFCRLFASFSGADLLKMSRDDLVQICGPADGIRLFNAIKGRNVRPKMTIYVCQELEQNRVPLQQKRDGSGDSNLSVYHAIFLEELTTLELIEKIANLYSISPQHIHRVYRQGPTGIHVVVSNEMVQNFQDESCFVLSTIKAESNDGYHIILKCGL

SEQ ID NO: 15762 - protein, 410 aa, Homo Sapiens
MAKDAGLIEANGELKVFIDQNLSPGKGVVSLVAVHPSTVNPLGKQLLPKTFGQSNVNIAQQVVIGTPQRPAASNTLVVGSPHTPSTHFASQNQPSDSSPWSAGKRNRKGEKNGKGLRHFSMKVCEKVQRKGTTSYNEVADELVAEFSAADNHILPNESAYDQKNIRRRVYDALNVLMAMNIISKEKKEIKWIGLPTNSAQECQNLEVERQRRLERIKQKQSQLQELILQQIAFKNLVQRNRHAEQQASRPPPPNSVIHLPFIIVNTSKKTVIDCSISNDKFEYLFNFDNTFEIHDDIEVLKRMGMACGLESGSCSAEDLKMARSLVPKALEPYVTEMAQGTVGGVFITTAGSTSNGTRFSASDLTNGADGMLATSSNGSQYSGSRVETPVSYVGEDDEEDDDFNENDEDD

SEQ ID NO: 15763 - protein, 446 aa, Homo Sapiens
MTAKNVGLTSTNAEVRGFIDQNLSPTKGNISFVAFPVSNTNSPTKILPKTLGPINVNVGPQMIISTPQRLTSSGSVLIGSPYTPAPAMVTQTHIAEATGWVPGDRKRARKFIDSDFSESKRSKKGDKNGKGLRHFSMKVCEKVQRKGTTSYNEVADELVSEFTNSNNHLAADSAYDQKNIRRRVYDALNVLMAMNIISKEKKEIKWIGLPTNSAQECQNLEIEKQRRIERIKQKRAQLQELLLQQIAFKNLVQRNRQNEQQNQGPPALNSTIQLPFIIINTSRKTVIDCSISSDKFEYLFNFDNTFEIHDDIEVLKRMGMSFGLESGKCSLEDLKLAKSLVPKALEGYITDISTGPSWLNQGLLLNSTQSVSNLDLTTGATLPQSSVNQGLCLDAEVALATGQFLAPNSHQSSSAASHCSESRGETPCSFNDEDEEDDEEDSSSPE

SEQ ID NO: 15764 - protein, 405 aa, Homo Sapiens
MAKYVSLTEANEELKVLMDENQTSRPVAVHTSTVNPLGKQLLPKTFGQSSVNIDQQVVIGMPQRPAASNIPVVGSPNPPSTHFASQNQHSYSSPPWAGQHNRKGEKNGMGLCRLSMKVWETVQRKGTTSCQEVVGELVAKFRAASNHASPNESAYDVKNIKRRTYDALNVLMAMNIISREKKKIKWIGLTTNSAQNCQNLRVERQKRLERIKQKQSELQQLILQQIAFKNLVLRNQYVEEQVSQRPLPNSVIHVPFIIISSSKKTVINCSISDDKSEYLFKFNSSFEIHDDTEVLMWMGMTFGLESGSCSAEDLKMARNLVPKALEPYVTEMAQGTFGGVFTTAGSRSNGTWLSASDLTNIAIGMLATSSGGSQYSGSRVETPAVEEEEEEDNNDDDLSENDEDD

SEQ ID NO: 15765 - protein, 575 aa, Homo Sapiens
MSHAAEPARDGVEASAEGPRAVFVLLEERRPADSAQLLSLNSLLPESGIVADIELENVLDPDSFYELKSQPLPLRSSLPISLQATPATPATLSASSSAGGSRTPAMSSSSSSRVLLRQQLMRAQAQEQERRERREQAAAAPFPSPAPASPAISVVGVSAGGHTLSRPPPAQVPREVLKVQTHLENPTRYHLQQARRQQVKQYLSTTLGPKLASQALTPPPGPASAQPLPAPEAAHTTGPTGSAPNSPMALLTIGSSSEKEIDDVIDEIISLESSYNDEMLSYLPGGTTGLQLPSTLPVSGNLLDVYSSQGVATPAITVSNSCPAELPNIKREISETEAKALLKERQKKDNHNLIERRRRFNINDRIKELGTLIPKSSDPEMRWNKGTILKASVDYIRKLQKEQQRSKDLESRQRSLEQANRSLQLRIQELELQAQIHGLPVPPTPGLLSLATTSASDSLKPEQLDIEEEGRPGAATFHVGGGPAQNAPHQQPPAPPSDALLDLHFPSDHLGDLGDPFHLGLEDILMEEEEGVVGGLSGGALSPLRAASDPLLSSVSPAVSKASSRRSSFSMEEES

SEQ ID NO: 15766 - protein, 476 aa, Homo Sapiens
MASRIGLRMQLMREQAQQEEQRERMQQQAVMHYMQQQQQQQQQQLGGPPTPAINTPVHFQSPPPVPGEVLKVQSYLENPTSYHLQQSQHQKVREYLSETYGNKFAAHISPAQGSPKPPPAASPGVRAGHVLSSSAGNSAPNSPMAMLHIGSNPERELDDVIDNIMRLDDVLGYINPEMQMPNTLPLSSSHLNVYSSDPQVTASLVGVTSSSCPADLTQKRELTDAESRALAKERQKKDNHNLIERRRRFNINDRIKELGMLIPKANDLDVRWNKGTILKASVDYIRRMQKDLQKSRELENHSRRLEMTNKQLWLRIQELEMQARVHGLPTTSPSGMNMAELAQQVVKQELPSEEGPGEALMLGAEVPDPEPLPALPPQAPLPLPTQPPSPFHHLDFSHSLSFGGREDEGPPGYPEPLAPGHGSPFPSLSKKDLDLMLLDDSLLPLASDPLLSTMSPEASKASSRRSSFSMEEGDVL

SEQ ID NO: 15767 - protein, 347 aa, Homo Sapiens
MTLDHQIINPTLKWSQPAVPSGGPLVQHAHTTLDSDAGLTENPLTKLLAIGKEDDNAQWHMEDVIEDIIGMESSFKEEGADSPLLMQRTLSGSILDVYSGEQGISPINMGLTSASCPSSLPMKREITETDTRALAKERQKKDNHNLIERRRRYNINYRIKELGTLIPKSNDPDMRWNKGTILKASVEYIKWLQKEQQRARELEHRQKKLEQANRRLLLRIQELEIQARTHGLPTLASLGTVDLGAHVTKQQSHPEQNSVDYCQQLTVSQGPSPELCDQAIAFSDPLSYFTDLSFSAALKEEQRLDGMLLDDTISPFGTDPLLSATSPAVSKESSRRSSFSSDDGDEL

SEQ ID NO: 15768 - protein, 401 aa, Homo Sapiens
MVLAQSRVSAGVGSPHCSGSGGGGSDSFPWPASHPGNPQCSFSTAFLASPRLSRGTLAYLPPAPWSSLATPSALLGSSCAPPPPPARCPQPRALSPELGTKAGPRRPHRWELPRSPSQGAQGPAPRRRLLETMKGIVAASGSETEDEDSMDIPLDLSSSAGSGKRRRRGNLPKESVQILRDWLYEHRYNAYPSEQEKALLSQQTHLSTLQVCNWFINARRRLLPDMLRKDGKDPNQFTISRRGAKISETSSVESVMGIKNFMPALEETPFHSCTAGPNPTLGRPLSPKPSSPGSVLARPSVICHTTVTALKDVPFSLCQSVGVGQNTDIQQIAAKNFTDTSLMYPEDTCKSGPSTNTQSGLFNTPPPTPPDLNQDFSGFQLLVDVALKRAAEMELQAKLTA

SEQ ID NO: 15769 - protein, 237 aa, Homo Sapiens
MSDSDLGEDEGLLSLAGKRKRRGNLPKESVKILRDWLYLHRYNAYPSEQEKLSLSGQTNLSVLQICNWFINARRRLLPDMLRKDGKDPNQFTISRRGGKASDVALPRGSSPSVLAVSVPAPTNVLSLSVCSMPLHSGQGEKPAAPFPRGELESPKPLVTPGSTLTLLTRAEAGSPTGGLFNTPPPTPPEQDKEDFSSFQLLVEVALQRAAEMELQKQQDPSLPLLHTPIPLVSENPQ

SEQ ID NO: 15770 - protein, 241 aa, Homo Sapiens
MEAAADGPAETQSPVEKDSPAKTQSPAQDTSIMSRNNADTGRVLALPEHKKKRKGNLPAESVKILRDWMYKHRFKAYPSEEEKQMLSEKTNLSLLQISNWFINARRRILPDMLQQRRNDPIIGHKTGKDAHATHLQSTEASVPAKSGPSGPDNVQSLPLWPLPKGQMSREKQPDPESAPSQKLTGIAQPKKKVKVSVTSPSSPELVSPEEHADFSSFLLLVDAAVQRAAELELEKKQEPNP

SEQ ID NO: 15771 - protein, 185 aa, Homo Sapiens
MEAAADGPAETQSPVEKDSPAKTQSPAQDTSIMSRNNADTGRVLALPEHKKKRKGNLPAESVKILRDWMYKHRFKAYPSEEEKQMLSEKTNLSLLRISNWFINARRRILPDMLQQRRNDPIIGHKTGKDAHATHLQSTEASVPAKSGPVVQTMYKACPCGPCQRARCQERSNQIRSRPLARSSPE

SEQ ID NO: 15772 - protein, 213 aa, Homo Sapiens
MVQSCSAYGCKNRYDKDKPVSFHKFPLTRPSLCKEWEAAVRRKNFKPTKYSSICSEHFTPDCFKRECNNKLLKENAVPTIFLCTEPHDKKEDLLEPQEQLPPPPLPPPVSQVDAAIGLLMPPLQTPVNLSVFCDHNYTVEDTMHQRKRIHQLEQQVEKLRKKLKTAQQRCRRQERQLEKLKEVVHFQKEKDDVSERGYVILPNDYFEIVEVPA

SEQ ID NO: 15773 - protein, 257 aa, Homo Sapiens
MPARCVAAHCGNTTKSGKSLFRFPKDRAVRLLWDRFVRGCRADWYGGNDRSVICSDHFAPACFDVSSVIQKNLRFSQRLRLVAGAVPTLHRVPAPAPKRGEEGDQAGRLDTRGELQAARHSEAAPGPVSCTRPRAGKQAAASQITCENELVQTQPHADNPSNTVTSVPTHCEEGPVHKSTQISLKRPRHRSVGIQAKVKAFGKRLCNATTQTEELWSRTSSLFDIYSSDSETDTDWDIKSEQSDLSYMAVQVKEETC

SEQ ID NO: 15774 - protein, 314 aa, Homo Sapiens
MPGFTCCVPGCYNNSHRDKALHFYTFPKDAELRRLWLKNVSRAGVSGCFSTFQPTTGHRLCSVHFQGGRKTYTVRVPTIFPLRGVNERKVARRPAGAAAARRRQQQQQQQQQQQQQQQQQQQQQQQQQQQQQSSPSASTAQTAQLQPNLVSASAAVLLTLQATVDSSQAPGSVQPAPITPTGEDVKPIDLTVQVEFAAAEGAAAAAAASELQAATAGLEAAECPMGPQLVVVGEEGFPDTGSDHSYSLSSGTTEEELLRKLNEQRDILALMEVKMKEMKGSIRHLRLTEAKLREELREKDRLLAMAVIRKKHGM

SEQ ID NO: 15775 - protein, 761 aa, Homo Sapiens
MPNFCAAPNCTRKSTQSDLAFFRFPRDPARCQKWVENCRRADLEDKTPDQLNKHYRLCAKHFETSMICRTSPYRTVLRDNAIPTIFDLTSHLNNPHSRHRKRIKELSEDEIRTLKQKKIDETSEQEQKHKETNNSNAQNPSEEEGEGQDEDILPLTLEEKENKEYLKSLFEILILMGKQNIPLDGHEADEIPEGLFTPDNFQALLECRINSGEEVLRKRFETTAVNTLFCSKTQQRQMLEICESCIREETLREVRDSHFFSIITDDVVDIAGEEHLPVLVRFVDESHNLREEFIGFLPYEADAEILAVKFHTMITEKWGLNMEYCRGQAYIVSSGFSSKMKVVASRLLEKYPQAIYTLCSSCALNMWLAKSVPVMGVSVALGTIEEVCSFFHRSPQLLLELDNVISVLFQNSKERGKELKEICHSQWTGRHDAFEILVELLQALVLCLDGINSDTNIRWNNYIAGRAFVLCSAVSDFDFIVTIVVLKNVLSFTRAFGKNLQGQTSDVFFAAGSLTAVLHSLNEVMENIEVYHEFWFEEATNLATKLDIQMKLPGKFRRAHQGNLESQLTSESYYKETLSVPTVEHIIQELKDIFSEQHLKALKCLSLVPSVMGQLKFNTSEEHHADMYRSDLPNPDTLSAELHCWRIKWKHRGKDIELPSTIYEALHLPDIKFFPNVYALLKVLCILPVMKVENERYENGRKRLKAYLRNTLTDQRSSNLALLNINFDIKHDLDLMVDTYIKLYTSKSELPTDNSETVENT

SEQ ID NO: 15776 - protein, 228 aa, Homo Sapiens
MPTNCAAAGCATTYNKHINISFHRFPLDPKRRKEWVRLVRRKNFVPGKHTFLCSKHFEASCFDLTGQTRRLKMDAVPTIFDFCTHIKSMKLKSRNLLKKNNSCSPAGPSNLKSNISSQQVLLEHSYAFRNPMEAKKRIIKLEKEIASLRRKMKTCLQKERRATRRWIKATCLVKNLEANSVLPKGTSEHMLPTALSSLPLEDFKILEQDQQDKTLLSLNLKQTKSTFI

SEQ ID NO: 15777 - protein, 239 aa, Homo Sapiens
MPKSCAARQCCNRYSSRRKQLTFHRFPFSRPELLKEWVLNIGRGNFKPKQHTVICSEHFRPECFSAFGNRKNLKHNAVPTVFAFQDPTQQVRENTDPASERGNASSSQKEKVLPEAGAGEDSPGRNMDTALEELQLPPNAEGHVKQVSPRRPQATEAVGRPTGPAGLRRTPNKQPSDHSYALLDLDSLKKKLFLTLKENEKLRKRLQAQRLVMRRMSSRLRACKGHQGLQARLGPEQQS

SEQ ID NO: 15778 - protein, 577 aa, Homo Sapiens
MVICCAAVNCSNRQGKGEKRAVSFHRFPLKDSKRLIQWLKAVQRDNWTPTKYSFLCSEHFTKDSFSKRLEDQHRLLKPTAVPSIFHLTEKKRGAGGHGRTRRKDASKATGGVRGHSSAATSRGAAGWSPSSSGNPMAKPESRRLKQAALQGEATPRAAQEAASQEQAQQALERTPGDGLATMVAGSQGKAEASATDAGDESATSSIEGGVTDKSGISMDDFTPPGSGACKFIGSLHSYSFSSKHTRERPSVPREPIDRKRLKKDVEPSCSGSSLGPDKGLAQSPPSSSLTATPQKPSQSPSAPPADVTPKPATEAVQSEHSDASPMSINEVILSASGACKLIDSLHSYCFSSRQNKSQVCCLREQVEKKNGELKSLRQRVSRSDSQVRKLQEKLDELRRVSVPYPSSLLSPSREPPKMNPVVEPLSWMLGTWLSDPPGAGTYPTLQPFQYLEEVHISHVGQPMLNFSFNSFHPDTRKPMHRECGFIRLKPDTNKVAFVSAQNTGVVEVEEGEVNGQELCIASHSIARISFAKEPHVEQITRKFRLNSEGKLEQTVSMATTTQPMTQHLHVTYKKVTP

SEQ ID NO: 15779 - protein, 395 aa, Homo Sapiens
MPRYCAAICCKNRRGRNNKDRKLSFYPFPLHDKERLEKWLKNMKRDSWVPSKYQFLCSDHFTPDSLDIRWGIRYLKQTAVPTIFSLPEDNQGKDPSKKKSQKKNLEDEKEVCPKAKSEESFVLNETKKNIVNTDVPHQHPELLHSSSLVKPPAPKTGSIQNNMLTLNLVKQHTGKPESTLETSVNQDTGRGGFHTCFENLNSTTITLTTSNSESIHQSLETQEVLEVTTSHLANPNFTSNSMEIKSAQENPFLFSTINQTVEELNTNKESVIAIFVPAENSKPSVNSFISAQKETTEMEDTDIEDSLYKDVDYGTEVLQIEHSYCRQDINKEHLWQKVSKLHSKITLLELKEQQTLGRLKSLEALIRQLKQENWLSEENVKIIENHFTTYEVTMI

SEQ ID NO: 15780 - protein, 222 aa, Homo Sapiens
MVKCCSAIGCASRCLPNSKLKGLTFHVFPTDENIKRKWVLAMKRLDVNAAGIWEPKKGDVLCSRHFKKTDFDRSAPNIKLKPGVIPSIFDSPYHLQGKREKLHCRKNFTLKTVPATNYNHHLVGASSCIEEFQSQFIFEHSYSVMDSPKKLKHKLDHVIGELEDTKESLRNVLDREKRFQKSLRKTIRELKDECLISQETANRLDTFCWDCCQESIEQDYIS

SEQ ID NO: 15781 - protein, 309 aa, Homo Sapiens
MPRHCSAAGCCTRDTRETRNRGISFHRLPKKDNPRRGLWLANCQRLDPSGQGLWDPASEYIYFCSKHFEEDCFELVGISGYHRLKEGAVPTIFESFSKLRRTTKTKGHSYPPGPAEVSRLRRCRKRCSEGRGPTTPFSPPPPADVTCFPVEEASAPATLPASPAGRLEPGLSSPFSDLLGPLGAQADEAGCSAQPSPERQPSPLEPRPVSPSAYMLRLPPPAGAYIQNEHSYQVGSALLWKRRAEAALDALDKAQRQLQACKRREQRLRLRLTKLQQERAREKRAQADARQTLKEHVQDFAMQLSSSMA

SEQ ID NO: 15782 - protein, 274 aa, Homo Sapiens
MPKYCRAPNCSNTAGRLGADNRPVSFYKFPLKDGPRLQAWLQHMGCEHWVPSCHQHLCSEHFTPSCFQWRWGVRYLRPDAVPSIFSRGPPAKSQRRTRSTQKPVSPPPPLQKNTPLPQSPAIPVSGPVRLVVLGPTSGSPKTVATMLLTPLAPAPTPERSQPEVPAQQAQTGLGPVLGALQRRVRRLQRCQERHQAQLQALERLAQQLHGESLLARARRGLQRLTTAQTLGPEESQTFTIICGGPDIAMVLAQDPAPATVDAKPELLDTRIPSA

SEQ ID NO: 15783 - protein, 903 aa, Homo Sapiens
MTRSCSAVGCSTRDTVLSRERGLSFHQFPTDTIQRSKWIRAVNRVDPRSKKIWIPGPGAILCSKHFQESDFESYGIRRKLKKGAVPSVSLYKIPQGVHLKGKARQKILKQPLPDNSQEVATEDHNYSLKTPLTIGAEKLAEVQQMLQVSKKRLISVKNYRMIKKRKGLRLIDALVEEKLLSEETECLLRAQFSDFKWELYNWRETDEYSAEMKQFACTLYLCSSKVYDYVRKILKLPHSSILRTWLSKCQPSPGFNSNIFSFLQRRVENGDQLYQYCSLLIKSMPLKQQLQWDPSSHSLQGFMDFGLGKLDADETPLASETVLLMAVGIFGHWRTPLGYFFVNRASGYLQAQLLRLTIGKLSDIGITVLAVTSDATAHSVQMAKALGIHIDGDDMKCTFQHPSSSSQQIAYFFDSCHLLRLIRNAFQNFQSIQFINGIAHWQHLVELVALEEQELSNMERIPSTLANLKNHVLKVNSATQLFSESVASALEYLLSLDLPPFQNCIGTIHFLRLINNLFDIFNSRNCYGKGLKGPLLPETYSKINHVLIEAKTIFVTLSDTSNNQIIKGKQKLGFLGFLLNAESLKWLYQNYVFPKVMPFPYLLTYKFSHDHLELFLKMLRQVLVTSSSPTCMAFQKAYYNLETRYKFQDEVFLSKVSIFDISIARRKDLALWTVQRQYGVSVTKTVFHEEGICQDWSHCSLSEALLDLSDHRRNLICYAGYVANKLSALLTCEDCITALYASDLKASKIGSLLFVKKKNGLHFPSESLCRVINICERVVRTHSRMAIFELVSKQRELYLQQKILCELSGHINLFVDVNKHLFDGEVCAINHFVKLLKDIIICFLNIRAKNVAQNPLKHHSERTDMKTLSRKHWSSVQDYKCSSFANTSSKFRHLLSNDGYPFK

SEQ ID NO: 15784 - protein, 539 aa, Homo Sapiens
MGSPEDDLIGIPFPDHSSELLSCLNEQRQLGHLCDLTIRTQGLEYRTHRAVLAACSHYFKKLFTEGGGGAVMGAGGSGTATGGAGAGVCELDFVGPEALGALLEFAYTATLTTSSANMPAVLQAARLLEIPCVIAACMEILQGSGLEAPSPDEDDCERARQYLEAFATATASGVPNGEDSPPQVPLPPPPPPPPRPVARRSRKPRKAFLQTKGARANHLVPEVPTVPAHPLTYEEEEVAGRVGSSGGSGPGDSYSPPTGTASPPEGPQSYEPYEGEEEEEELVYPPAYGLAQGGGPPLSPEELGSDEDAIDPDLMAYLSSLHQDNLAPGLDSQDKLVRKRRSQMPQECPVCHKIIHGAGKLPRHMRTHTGEKPFACEVCGVRFTRNDKLKIHMRKHTGERPYSCPHCPARFLHSYDLKNHMHLHTGDRPYECHLCHKAFAKEDHLQRHLKGQNCLEVRTRRRRKDDAPPHYPPPSTAAASPAGLDLSNGHLDTFRLSLARFWEQSAPTGPPVSTPGPPDDDEEEGAPTTPQAEGAMESS

SEQ ID NO: 15785 - protein, 490 aa, Homo Sapiens
MEQKPSKVECGSDPEENSARSPDGKRKRKNGQCSLKTSMSGYIPSYLDKDEQCVVCGDKATGYHYRCITCEGCKGFFRRTIQKNLHPTYSCKYDSCCVIDKITRNQCQLCRFKKCIAVGMAMDLVLDDSKRVAKRKLIEQNRERRRKEEMIRSLQQRPEPTPEEWDLIHIATEAHRSTNAQGSHWKQRRKFLPDDIGQSPIVSMPDGDKVDLEAFSEFTKIITPAITRVVDFAKKLPMFSELPCEDQIILLKGCCMEIMSLRAAVRYDPESDTLTLSGEMAVKREQLKNGGLGVVSDAIFELGKSLSAFNLDDTEVALLQAVLLMSTDRSGLLCVDKIEKSQEAYLLAFEHYVNHRKHNIPHFWPKLLMKEREVQSSILYKGAAAEGRPGGSLGVHPEGQQLLGMHVVQGPQVRQLEQQLGEAGSLQGPVLQHQSPKSPQQRLLELLHRSGILHARAVCGEDDSSEADSPSSSEEEPEVCEDLAGNAASP

SEQ ID NO: 15786 - protein, 461 aa, Homo Sapiens
MTPNSMTENGLTAWDKPKHCPDREHDWKLVGMSEACLHRKSHSERRSTLKNEQSSPHLIQTTWTSSIFHLDHDDVNDQSVSSAQTFQTEEKKCKGYIPSYLDKDELCVVCGDKATGYHYRCITCEGCKGFFRRTIQKNLHPSYSCKYEGKCVIDKVTRNQCQECRFKKCIYVGMATDLVLDDSKRLAKRKLIEENREKRRREELQKSIGHKPEPTDEEWELIKTVTEAHVATNAQGSHWKQKRKFLPEDIGQAPIVNAPEGGKVDLEAFSHFTKIITPAITRVVDFAKKLPMFCELPCEDQIILLKGCCMEIMSLRAAVRYDPESETLTLNGEMAVTRGQLKNGGLGVVSDAIFDLGMSLSSFNLDDTEVALLQAVLLMSSDRPGLACVERIEKYQDSFLLAFEHYINYRKHHVTHFWPKLLMKVTDLRMIGACHASRFLHMKVECPTELFPPLFLEVFED

SEQ ID NO: 15787 - protein, 330 aa, Homo Sapiens
MEHLGPHHLHPGHAEPISFGIDQILNSPDQGGCMGPASRLQDGEYGLGCLVGGAYTYGGGGSAAATGAGGAGAYGTGGPGGPGGPAGGGGACSMGPLTGSYNVNMALAGGPGPGGGGGSSGGAGALSAAGVIRVPAHRPLAGAVAHPQPLATGLPTVPSVPAMPGVNNLTGLTFPWMESNRRYTKDRFTGHPYQNRTPPKKKKPRTSFTRLQICELEKRFHRQKYLASAERAALAKALKMTDAQVKTWFQNRRTKWRRQTAEEREAERQQANRILLQLQQEAFQKSLAQPLPADPLCVHNSSLFALQNLQPWSDDSTKITSVTSVASACE

SEQ ID NO: 15788 - protein, 284 aa, Homo Sapiens
MEPGMLGPHNLPHHEPISFGIDQILSGPETPGGGLGLGRGGQGHGENGAFSGGYHGASGYGPAGSLAPLPGSSGVGPGGVIRVPAHRPLPVPPPAGGAPAVPGPSGLGGAGGLAGLTFPWMDSGRRFAKDRLTAALSPFSGTRRIGHPYQNRTPPKRKKPRTSFSRSQVLELERRFLRQKYLASAERAALAKALRMTDAQVKTWFQNRRTKWRRQTAEEREAERHRAGRLLLHLQQDALPRPLRPPLPPDPLCLHNSSLFALQNLQPWAEDNKVASVSGLASVV

SEQ ID NO: 15789 - protein, 291 aa, Homo Sapiens
MEAPASAQTPHPHEPISFGIDQILNSPDQDSAPAPRGPDGASYLGGPPGGRPGATYPSLPASFAGLGAPFEDAGSYSVNLSLAPAGVIRVPAHRPLPGAVPPPLPSALPAMPSVPTVSSLGGLNFPWMESSRRFVKDRFTAAAALTPFTVTRRIGHPYQNRTPPKRKKPRTSFSRVQICELEKRFHRQKYLASAERAALAKSLKMTDAQVKTWFQNRRTKWRRQTAEEREAERQQASRLMLQLQHDAFQKSLNDSIQPDPLCLHNSSLFALQNLQPWEEDSSKVPAVTSLV

SEQ ID NO: 15790 - protein, 510 aa, Homo Sapiens
MAADSDDGAVSAPAASDGGVSKSTTSGEELVVQVPVVDVQSNNFKEMWPSLLLAIKTANFVAVDTELSGLGDRKSLLNQCIEERYKAVCHAARTRSILSLGLACFKRQPDKGEHSYLAQVFNLTLLCMEEYVIEPKSVQFLIQHGFNFNQQYAQGIPYHKGNDKGDESQSQSVRTLFLELIRARRPLVLHNGLIDLVFLYQNFYAHLPESLGTFTADLCEMFPAGIYDTKYAAEFHARFVASYLEYAFRKCERENGKQRAAGSPHLTLEFCNYPSSMRDHIDYRCCLPPATHRPHPTSICDNFSAYGWCPLGPQCPQSHDIDLIIDTDEAAAEDKRRRRRRREKRKRALLNLPGTQTSGEAKDGPPKKQVCGDSIKPEETEQEVAADETRNLPHSKQGNKNDLEMGIKAARPEIADRATSEVPGSQASPNPVPGDGLHRAGFDAFMTGYVMAYVEVSQGPQPCSSGPWLPECHNKVYLSGKAVPLTVAKSQFSRSSKAHNQKMKLTWGSS

SEQ ID NO: 15791 - protein, 1378 aa, Homo Sapiens
MSLERELRQLSKAKAKAQRAGQRREEAALCHQLGELLAGHGRYAEALEQHWQELQLRERADDPLGCAVAHRKIGERLAEMEDYPAALQHQHQYLELAHSLRNHTELQRAWATIGRTHLDIYDHCQSRDALLQAQAAFEKSLAIVDEELEGTLAQGELNEMRTRLYLNLGLTFESLQQTALCNDYFRKSIFLAEQNHLYEDLFRARYNLGTIHWRAGQHSQAMRCLEGARECAHTMRKRFMESECCVVIAQVLQDLGDFLAAKRALKKAYRLGSQKPVQRAAICQNLQHVLAVVRLQQQLEEAEGRDPQGAMVICEQLGDLFSKAGDFPRAAEAYQKQLRFAELLDRPGAERAIIHVSLATTLGDMKDHHGAVRHYEEELRLRSGNVLEEAKTWLNIALSREEAGDAYELLAPCFQKALSCAQQAQRPQLQRQVLQHLHTVQLRLQPQEAPETETRLRELSVAEDEDEEEEAEEAAATAESEALEAGEVELSEGEDDTDGLTPQLEEDEELQGHLGRRKGSKWNRRNDMGETLLHRACIEGQLRRVQDLVRQGHPLNPRDYCGWTPLHEACNYGHLEIVRFLLDHGAAVDDPGGQGCEGITPLHDALNCGHFEVAELLLERGASVTLRTRKGLSPLETLQQWVKLYRRDLDLETRQKARAMEMLLQAAASGQDPHSSQAFHTPSSLLFDPETSPPLSPCPEPPSNSTRLPEASQAHVRVSPGQAAPAMARPRRSRHGPASSSSSSEGEDSAGPARPSQKRPRCSATAQRVAAWTPGPASNREAATASTSRAAYQAAIRGVGSAQSRLGPGPPRGHSKALAPQAALIPEEECLAGDWLELDMPLTRSRRPRPRGTGDNRRPSSTSGSDSEESRPRARAKQVRLTCMQSCSAPVNAGPSSLASEPPGSPSTPRVSEPSGDSSAAGQPLGPAPPPPIRVRVQVQDHLFLIPVPHSSDTHSVAWLAEQAAQRYYQTCGLLPRLTLRKEGALLAPQDLIPDVLQSNDEVLAEVTSWDLPPLTDRYRRACQSLGQGEHQQVLQAVELQGLGLSFSACSLALDQAQLTPLLRALKLHTALRELRLAGNRLGDKCVAELVAALGTMPSLALLDLSSNHLGPEGLRQLAMGLPGQATLQSLEELDLSMNPLGDGCGQSLASLLHACPLLSTLRLQACGFGPSFFLSHQTALGSAFQDAEHLKTLSLSYNALGAPALARTLQSLPAGTLLHLELSSVAAGKGDSDLMEPVFRYLAKEGCALAHLTLSANHLGDKAVRDLCRCLSLCPSLISLDLSANPEISCASLEELLSTLQKRPQGLSFLGLSGCAVQGPLGLGLWDKIAAQLRELQLCSRRLCAEDRDALRQLQPSRPGPGECTLDHGSKLFFRRL

SEQ ID NO: 15792 - protein, 1045 aa, Homo Sapiens
MGSQPPLGSPLSREEGEAPPPAPASEGRRRSRRVRLRGSCRHRPSFLGCRELAASAPARPAPASSEIMASAAKEFKMDNFSPKAGTSKLQQTVPADASPDSKCPICLDRFDNVSYLDRCLHKFCFRCVQEWSKNKAECPLCKQPFDSIFHSVRAEDDFKEYVLRPSYNGSFVTPDRRFRYRTTLTRERNASVYSPSGPVNRRTTTPPDSGVLFEGLGISTRPRDVEIPQFMRQIAVRRPTTADERSLRKIQEQDIINFRRTLYRAGARVRNIEDGGRYRDISAEFFRRNPACLHRLVPWLKRELTVLFGAHGSLVNIVQHIIMSNVTRYDLESQAFVSDLRPFLLNRTEHFIHEFISFARSPFNMAAFDQHANYDCPAPSYEEGSHSDSSVITISPDEAETQELDINVATVSQAPWDDETPGPSYSSSEQVHVTMSSLLNTSDSSDEELVTGGATSQIQGVQTNDDLNNDSDDSSDNCVIVGFVKPLAERTPELVELSSDSEDLGSYEKMETVKTQEQEQSYSSGDSDVSRCSSPHSVLGKDEQINKGHCDSSTRIKSKKEEKRSTSLSSPRNLNSSVRGDRVYSPYNHRHRKRGRSRSSDSRSQSRSGHDQKNHRKHHGKKRMKSKRSRSRESSRPRGRRDKKRSRTRDSSWSRRSQTLSLSSESTSRSRSRSSDHGKRRSRSRNRDRYYLRNNYGSRYKWEYTYYSRNKDRDGYESSYRRRTLSRAHYSRQSSSPEFRVQSFSERTNARKKNNHSERKYYYYERHRSRSLSSNRSRTASTGTDRVRNEKPGGKRKYKTRHLEGTNEVAQPSREFASKAKDSHYQKSSSKLDGNYKNESDTFSDSRSSDRETKHKRRKRKTRSLSVEIVYEGKATDTTKHHKKKKKKHKKKHKKHHGDNASRSPVVITIDSDSDKDSEVKEDTECDNSGPQDPLQNEFLAPSLEPFETKDVVTIEAEFGVLDKECDIATLSNNLNNANKTVDNIPPLAASVEQTLDVREESTFVSDLENQPSNIVSLQTEPSRQLPSPRTSLMSVCLGRDCDMS

SEQ ID NO: 15793 - protein, 526 aa, Homo Sapiens
MDVRFYPPPAQPAAAPDAPCLGPSPCLDPYYCNKFDGENMYMSMTEPSQDYVPASQSYPGPSLESEDFNIPPITPPSLPDHSLVHLNEVESGYHSLCHPMNHNGLLPFHPQNMDLPEITVSNMLGQDGTLLSNSISVMPDIRNPEGTQYSSHPQMAAMRPRGQPADIRQQPGMMPHGQLTTINQSQLSAQLGLNMGGSNVPHNSPSPPGSKSATPSPSSSVHEDEGDDTSKINGGEKRPASDMGKKPKTPKKKKKKDPNEPQKPVSAYALFFRDTQAAIKGQNPNATFGEVSKIVASMWDGLGEEQKQVYKKKTEAAKKEYLKQLAAYRASLVSKSYSEPVDVKTSQPPQLINSKPSVFHGPSQAHSALYLSSHYHQQPGMNPHLTAMHPSLPRNIAPKPNNQMPVTVSIANMAVSPPPPLQISPPLHQHLNMQQHQPLTMQQPLGNQLPMQVQSALHSPTMQQGFTLQPDYQTIINPTSTAAQVVTQAMEYVRSGCRNPPPQPVDWNNDYCSSGGMQRDKALYLT

SEQ ID NO: 15794 - protein, 488 aa, Homo Sapiens
MQQTRTEAVAGAFSRCLGFCGMRLGLLLLARHWCIAGVFPQKFDGDSAYVGMSDGNPELLSTSQTYNGQSENNEDYEIPPITPPNLPEPSLLHLGDHEASYHSLCHGLTPNGLLPAYSYQAMDLPAIMVSNMLAQDSHLLSGQLPTIQEMVHSEVAAYDSGRPGPLLGRPAMLASHMSALSQSQLISQMGIRSSIAHSSPSPPGSKSATPSPSSSTQEEESEVHFKISGEKRPSADPGKKAKNPKKKKKKDPNEPQKPVSAYALFFRDTQAAIKGQNPSATFGDVSKIVASMWDSLGEEQKQSSPDQGETKSTQANPPAKMLPPKQPMYAMPGLASFLTPSDLQAFRSGASPASLARTLGSKSLLPGLSASPPPPPSFPLSPTLHQQLSLPPHAQGALLSPPVSMSPAPQPPVLPTPMALQVQLAMSPSPPGPQDFPHISEFPSSSGSCSPGPSNPTSSGDWDSSYPSGECGISTCSLLPRDKSLYLT

SEQ ID NO: 15795 - protein, 576 aa, Homo Sapiens
MDVRFYPAAAGDPASLDFAQCLGYYGYSKFGNNNNYMNMAEANNAFFAASEQTFHTPSLGDEEFEIPPITPPPESDPALGMPDVLLPFQALSDPLPSQGSEFTPQFPPQSLDLPSITISRNLVEQDGVLHSSGLHMDQSHTQVSQYRQDPSLIMRSIVHMTDAARSGVMPPAQLTTINQSQLSAQLGLNLGGASMPHTSPSPPASKSATPSPSSSINEEDADEANRAIGEKRAAPDSGKKPKTPKKKKKKDPNEPQKPVSAYALFFRDTQAAIKGQNPNATFGEVSKIVASMWDSLGEEQKQVYKRKTEAAKKEYLKALAAYRASLVSKAAAESAEAQTIRSVQQTLASTNLTSSLLLNTPLSQHGTVSASPQTLQQSLPRSIAPKPLTMRLPMNQIVTSVTIAANMPSNIGAPLISSMGTTMVGSAPSTQVSPSVQTQQHQMQLQQQQQQQQQQMQQMQQQQLQQHQMHQQIQQQMQQQHFQHHMQQHLQQQQQHLQQQINQQQLQQQLQQRLQLQQLQHMQHQSQPSPRQHSPVASQITSPIPAIGSPQPASQQHQSQIQSQTQTQVLSQVSIF

SEQ ID NO: 15796 - protein, 621 aa, Homo Sapiens
MEFPGGNDNYLTITGPSHPFLSGAETFHTPSLGDEEFEIPPISLDSDPSLAVSDVVGHFDDLADPSSSQDGSFSAQYGVQTLDMPVGMTHGLMEQGGGLLSGGLTMDLDHSIGTQYSANPPVTIDVPMTDMTSGLMGHSQLTTIDQSELSSQLGLSLGGGTILPPAQSPEDRLSTTPSPTSSLHEDGVEDFRRQLPSQKTVVVEAGKKQKAPKKRKKKDPNEPQKPVSAYALFFRDTQAAIKGQNPNATFGEVSKIVASMWDSLGEEQKQVYKRKTEAAKKEYLKALAAYKDNQECQATVETVELDPAPPSQTPSPPPMATVDPASPAPASIEPPALSPSIVVNSTLSSYVANQASSGAGGQPNITKLIITKQMLPSSITMSQGGMVTVIPATVVTSRGLQLGQTSTATIQPSQQAQIVTRSVLQAAAAAAAAASMQLPPPRLQPPPLQQMPQPPTQQQVTILQQPPPLQAMQQPPPQKVRINLQQQPPPLQIKSVPLPTLKMQTTLVPPTVESSPERPMNNSPEAHTVEAPSPETICEMITDVVPEVESPSQMDVELVSGSPVALSPQPRCVRSGCENPPIVSKDWDNEYCSNECVVKHCRDVFLAWVASRNSNTVVFVK

SEQ ID NO: 15797 - protein, 393 aa, Homo Sapiens [sequence omitted]

SEQ ID NO: 15798 - protein, 680 aa, Homo Sapiens
MNFETSRCATLQYCPDPYIQRFVETPAHFSWKESYYRSTMSQSTQTNEFLSPEVFQHIWDFLEQPICSVQPIDLNFVDEPSEDGATNKIEISMDCIRMQDSDLSDPMWPQYTNLGLLNSMDQQIQNGSSSTSPYNTDHAQNSVTAPSPYAQPSSTFDALSPSPAIPSNTDYPGPHSFDVSFQQSSTAKSATWTYSTELKKLYCQIAKTCPIQIKVMTPPPQGAVIRAMPVYKKAEHVTEVVKRCPNHELSREFNEGQIAPPSHLIRVEGNSHAQYVEDPITGRQSVLVPYEPPQVGTEFTTVLYNFMCNSSCVGGMNRRPILIIVTLETRDGQVLGRRCFEARICACPGRDRKADEDSIRKQQVSDSTKNGDGTKRPFRQNTHGIQMTSIKKRRSPDDELLYLPVRGRETYEMLLKIKESLELMQYLPQHTIETYRQQQQQQHQHLLQKQTSIQSPSSYGNSSPPLNKMNSMNKLPSVSQLINPQQRNALTPTTIPDGMGANIPMMGTHMPMAGDMNGLSPTQALPPPLSMPSTSHCTPPPPYPTDCSIVSFLARLGCSSCLDYFTTQGLTTIYQIEHYSMDDLASLKIPEQFRHAIWKGILDHRQLHEFSSPSHLLRTPSSASTVSVGSSETRGERVIDAVRFTLRQTISFPPRDEWNDFNFDMDARRNKQQRIKEEGE

SEQ ID NO: 15799 - protein, 636 aa, Homo Sapiens
MAQSTATSPDGGTTFEHLWSSLEPDSTYFDLPQSSRGNNEVVGGTDSSMDVFHLEGMTTSVMAQFNLLSSTMDQMSSRAASASPYTPEHAASVPTHSPYAQPSSTFDTMSPAPVIPSNTDYPGPHHFEVTFQQSSTAKSATWTYSPLLKKLYCQIAKTCPIQIKVSTPPPPGTAIRAMPVYKKAEHVTDVVKRCPNHELGRDFNEGQSAPASHLIRVEGNNLSQYVDDPVTGRQSVVVPYEPPQVGTEFTTILYNFMCNSSCVGGMNRRPILIIITLEMRDGQVLGRRSFEGRICACPGRDRKADEDHYREQQALNESSAKNGAASKRAFKQSPPAVPALGAGVKKRRHGDEDTYYLQVRGRENFEILMKLKESLELMELVPQPLVDSYRQQQQLLQRPSHLQPPSYGPVLSPMNKVHGGMNKLPSVNQLVGQPPPHSSAATPNLGPVGPGMLNNHGHAVPANGEMSSSHSAQSMVSGSHCTPPPPYHADPSLVSFLTGLGCPNCIEYFTSQGLQSIYHLQNLTIEDLGALKIPEQYRMTIWRGLQDLKQGHDYSTAQQLLRSSNAATISIGGSGELQRQRVMEAVHFRVRHTITIPNRGGPGGGPDEWADFGFDLPDCKARKQPIKEEFTEAEIH

SEQ ID NO: 15800 - protein, 411 aa, Homo Sapiens
MLSLREQQLQVWFKNRRAKLARERRLQQQPQRVPGQRGRGARAAPLVPAASASAPQRGPSGILPAAEPTICSLHQAWGGPGCRAQKGIPAALSPGPGPIPAPIPGPAQIPGPLPGSIPGPIPGPAQIPSPIPAPIPGPISGPVQIPGPFRGPIPGPISGPAPIPGPISGPFSGPNPGPIPGPNPGPIPGPISGPIPGPISVPIPGPIPGPISGPISGPNPGPIPGPIPGPISGPNPGPIPGPISGPNPGLIPGPIPGPISGPGPIIGPIPSPAQIPGPGRLQGPGPILSPGRMRSPGSLPGLAPILGPGSGPGSGSVPAPIPGPGSLPAPAPLWPQSPDASDFLPDTQLFPHFTELLLPLDPLEGSSVSTMTSQYQEGDDSMGKKHSGSQPQEEGGSVNENHSGPRLLLDL

SEQ ID NO: 15801 - protein, 258 aa, Homo Sapiens
MTHDKSWRRCSISGSTKCRCGSRIAGPNALGSGGSRSSSSSSRSILSSSILSSSIPSSSSSSSSPSSSHSSSSPSSSHSSSSPSSSSSTSSPSSSSSSSSSSSPSSSNSSSSSSSSSPSSSSSSSSSSPSSSSSSPSSSSSSSSSSPSSSSSSPSSSSSSSSSSSSSPSSSSPSSSGSSPSSSNSSPSSSSSSPSSSSSSPSPRSSSPSSSSSSTSSPSTSSPSSSSPSSSSPSSSCPSAALGRRPQSPQSSHCAPFP

SEQ ID NO: 15802 - protein, 1200 aa, Homo Sapiens
MGDQQLYKTNHVAHGSENLFYQQPPLGVHSGLNHNYGNAVTGGGMDAPQASPISPHFPQDTRDGLGLPVGSKNLGQMDTSRQGGWGSHAGPGNHVQLRGNLANSNMMWGAPAQAEPTDGYQYTYSQASEIRTQKLTSGVLHKLDSFTQVFANQNLRIQVNNMAQVLHTQSAVMDGAPDSALRQLLSQKPMEPPAPAIPSRYQQVPQQPHPGFTGGLSKPALQVGQHPTQGHLYYDYQQPLAQVPVQGGQPLQAPQMLSQHMQQMQQHQYYPPQQQQQAGQQRISMQEIQTQPQQIRPSQPQPPPQQQQPQQLQLQQRQGSMQIPQYYQPQPMMQHLQEQQQQQMHLQPPSYHRDPHQYTPEQAHTVQLIPLGSMSQYYYQEPQQPYSHPLYQQSHLSQHQQREDSQLKTYSSDRQAQAMLSSHGDLGPPDTGMGDPASSDLTRVSSTLPHRPLLSPSGIHLNNMGPQHQQLSPSAMWPQMHLPDGRAQPGSPESSGQPKGAFGEQFDAKNKLTCSICLKEFKNLPALNGHMRSHGGMRASPNLKQEEGEKVLPPQPQPPLPPPPPPPPPPQLPPEAESLTPMVMPVSVPVKLLPPKPSSQGFTNSTVAAPSARDKPASSMSDDEMPVLEIPRKHQPSVPKAEEPLKTVQEKKKFRHRPEPLFIPPPPSYNPNPAASYSGATLYQSQLRSPRVLGDHLLLDPTHELPPYTPPPMLSPVRQGSGLFSNVLISGHGPGAHPQLPLTPLTPTPRVLLCRSNSIDGSNVTVTPGPGEQTVDVEPRINIGLRFQAEIPELQDISALAQDTHKATLVWKPWPELENHDLQQRVENLLNLCCSSALPGGGTNSEFALHSLFEAKGDVMVALEMLLLRKPVRLKCHPLANYHYAGSDKWTSLERKLFNKALATYSKDFIFVQKMVKSKTVAQCVEYYYTWKKIMRLGRKHRTRLAEIIDDCVTSEEEEELEEEEEEDPEEDRKSTKEEESEVPKSPEPPPVPVLAPTEGPPLQALGQPSGSFICEMPNCGAVFSSRQALNGHARIHGGTNQVTKARGAIPSGKQKPGGTQSGYCSVKSSPSHSTTSGETDPTTIFPCKECGKVFFKIKSRNAHMKTHRQQEEQQRQKAQKAAFAAEMAATIERTTGPVGAPGLLPLDQLSLIKPIKDVDILDDDVVQQLGGVMEEAEVVDTDLLLDDQDSVLLQGDAEL

SEQ ID NO: 15803 - protein, 1281 aa, Homo Sapiens
MVRKKNPPLRNVASEGEGQILEPIGTESKVSGKNKEFSADQMSENTDQSDAAELNHKEEHSLHVQDPSSSSKKDLKSAVLSEKAGFNYESPSKGGNFPSFPHDEVTDRNMLAFSSPAAGGVCEPLKSPQRAEADDPQDMACTPSGDSLETKEDQKMSPKATEETGQAQSGQANCQGLSPVSVASKNPQVPSDGGVRLNKSKTDLLVNDNPDPAPLSPELQDFKCNICGYGYYGNDPTDLIKHFRKYHLGLHNRTRQDAELDSKILALHNMVQFSHSKDFQKVNRSVFSGVLQDINSSRPVLLNGTYDVQVTSGGTFIGIGRKTPDCQGNTKYFRCKFCNFTYMGNSSTELEQHFLQTHPNKIKASLPSSEVAKPSEKNSNKSIPALQSSDSGDLGKWQDKITVKAGDDTPVGYSVPIKPLDSSRQNGTEATSYYWCKFCSFSCESSSSLKLLEHYGKQHGAVQSGGLNPELNDKLSRGSVINQNDLAKSSEGETMTKTDKSSSGAKKKDFSSKGAEDNMVTSYNCQFCDFRYSKSHGPDVIVVGPLLRHYQQLHNIHKCTIKHCPFCPRGLCSPEKHLGEITYPFACRKSNCSHCALLLLHLSPGAAGSSRVKHQCHQCSFTTPDVDVLLFHYESVHESQASDVKQEANHLQGSDGQQSVKESKEHSCTKCDFITQVEEEISRHYRRAHSCYKCRQCSFTAADTQSLLEHFNTVHCQEQDITTANGEEDGHAISTIKEEPKIDFRVYNLLTPDSKMGEPVSESVVKREKLEEKDGLKEKVWTESSSDDLRNVTWRGADILRGSPSYTQASLGLLTPVSGTQEQTKTLRDSPNVEAAHLARPIYGLAVETKGFLQGAPAGGEKSGALPQQYPASGENKSKDESQSLLRRRRGSGVFCANCLTTKTSLWRKNANGGYVCNACGLYQKLHSTPRPLNIIKQNNGEQIIRRRTRKRLNPEALQAEQLNKQQRGSNEEQVNGSPLERRSEDHLTESHQREIPLPSLSKYEAQGSLTKSHSAQQPVLVSQTLDIHKRMQPLHIQIKSPQESTGDPGNSSSVSEGKGSSERGSPIEKYMRPAKHPNYSPPGSPIEKYQYPLFGLPFVHNDFQSEADWLRFWSKYKLSVPGNPHYLSHVPGLPNPCQNYVPYPTFNLPPHFSAVGSDNDIPLDLAIKHSRPGPTANGASKEKTKAPPNVKNEGPLNVVKTEKVDRSTQDELSTKCVHCGIVFLDEVMYALHMSCHGDSGPFQCSICQHLCTDKYDFTTHIQRGLHRNNAQVEKNGKPKE

SEQ ID NO: 15804 - protein, 1073 aa, Homo Sapiens
MHQPPESTAAAAAAADISARKMAHPAMFPRRGSGSGSASALNAAGTGVGSNATSSEDFPPPSLLQPPPPAASSTSGPQPPPPQSLNLLSQAQLQAQPLAPGGTQMKKKSGFQITSVTPAQISASISSNNSIAEDTESYDDLDESHTEDLSSSEILDVSLSRATDLGEPERSSSEETLNNFQEAETPGAVSPNQPHLPQPHLPHLPQQNVVINGNAHPHHLHHHHQIHHGHHLQHGHHHPSHVAVASASITGGPPSSPVSRKLSTTGSSDSITPVAPTSAVSSSGSPASVMTNMRAPSTTGGIGINSVTGTSTVNNVNITAVGSFNPNVTSSMLGNVNISTSNIPSAAGVSVGPGVTSGVNVNILSGMGNGTISSSAAVSSVPNAAAGMTGGSVSSQQQQPTVNTSRFRVVKLDSSSEPFKKGRWTCTEFYEKENAVPATEGVLINKVVETVKQNPIEVTSERESTSGSSVSSSVSTLSHYTESVGSGEMGAPTVVVQQQQQQQQQQQQQPALQGVTLQQMDFGSTGPQSIPAVSIPQSISQSQISQVQLQSQELSYQQKQGLQPVPLQATMSAATGIQPSPVNVVGVTSALGQQPSISSLAQPQLPYSQAAPPVQTPLPGAPPPQQLQYGQQQPMVSTQMAPGHVKSVTQNPASEYVQQQPILQTAMSSGQPSSAGVGAGTTVIPVAQPQGIQLPVQPTAVPAQPAGASVQPVGQAPAAVSAVPTGSQIANIGQQANIPTAVQQPSTQVPPSVIQQGAPPSSQVVPPAQTGIIHQGVQTSAPSLPQQLVIASQSSLLTVPPQPQGVEPVAQGIVSQQLPAVSSLPSASSISVTSQVSSTGPSGMPSAPTNLVPPQNIAQTPATQNGNLVQSVSQPPLIATNTNLPLAQQIPLSSTQFSAQSLAQAIGSQIEDARRAAEPSLVGLPQTISGDSGGMSAVSDGSSSSLAASASLFPLKVLPLTTPLVDGEDESSSGASVVAIDNKIEQAMDLVKSHLMYAVREEVEVLKEQIKELIEKNSQLEQENNLLKTLASPEQLAQFQAQLQTGSPPATTQPQGTTQPPAQPASQGSGPTA

SEQ ID NO: 15805 - protein, 780 aa, Homo Sapiens
MSKMPAKKKSCFQITSVTTAQVATSITEDTESLDDPDESRTEDVSSEIFDVSRATDYGPEEVCERSSSEETLNNVGDAETPGTVSPNLLLDGQLAAAAAAPANGGGVVSARSVSGALASTLAAAATSAPAPGAPGGPQLAGSSAGPVTAAPSQPPTTCSSRFRVIKLDHGSGEPYRRGRWTCMEYYERDSDSSVLTRSGDCIRHSSTFDQTAERDSGLGATGGSVVVVVASMQGAHGPESGTDSSLTAVSQLPPSEKMSQPTPAQPQSFSVGQPQPPPPPVGGAVAQSSAPLPPFPGAATGPQPMMAAAQPSQPQGAGPGGQTLPPTNVTLAQPAMSLPPQPGPAVGAPAAQQPQQFAYPQPQIPPGHLLPVQPSGQSEYLQQHVAGLQPPSPAQPSSTGAAASPATAATLPVGTGQNASSVGAQLMGASSQPSEAMAPRTGPAQGGQVAPCQPTGVPPATVGGVVQPCLGPAGAGQPQSVPPPQMGGSGPLSAVPGGPHAVVPGVPNVPAAVPAPSVPSVSTTSVTMPNVPAPLAQSQQLSSHTPVSRSSSIIQHVGLPLAPGTHSAPTSLPQSDLSQFQTQTQPLVGQVDDTRRKSEPLPQPPLSLIAENKPVVKPPVADSLANPLQLTPMNSLATSVFSIAIPVDGDEDRNPSTAFYQAFHLNTLKESKSLWDSASGGGVVAIDNKIEQAMDLVKSHLMYAVREEVEVLKEQIKELVERNSLLERENALLKSLSSNDQLSQLPTQQANPGSTSQQQAVIAQPPQPTQPPQQPNVSSA

SEQ ID NO: 15806 - protein, 134 aa, Homo Sapiens
MNTEMYQTPMEVAVYQLHNFSISFFSSLLGGDVVSVKLDNSASGASVVAIDNKIEQAMDLVKNHLMYAVREEVEILKEQIRELVEKNSQLERENTLLKTLASPEQLEKFQSCLSPEEPAPESPQVPEAPGGSAV

SEQ ID NO: 15807 - protein, 395 aa, Homo Sapiens; identical to SEQ ID NO: 13764

SEQ ID NO: 15808 - protein, 1077 aa, Homo Sapiens
MPRRKQQAPRRSAAYVPEEELKAAEIDEEHVEDDGLSLDIQESEYMCNEETEIKEAQSYQNSPVSSATNQDAGYGSPFSESSDQLAHFKGSSSREEKEDPQCPDSVSYPQDSLAQIKAVYANLFSESCWSSLALDLKKSGSTTSTNDASQKESSAPTPTPPTCPVSTTGPTTSTPSTSCSSSTSHSSTTSTSSSSGYDWHQAALAKTLQQTSSYGLLPEPSLFSTVQLYRQNNKLYGSVFTGASKFRCKDCSAAYDTLVELTVHMNETGHYRDDNRDKDSEKTKRWSKPRKRSLMEMEGKEDAQKVLKCMYCGHSFESLQDLSVHMIKTKHYQKVPLKEPVPAITKLVPSTKKRALQDLAPPCSPEPAGMAAEVALSESAKDQKAANPYVTPNNRYGYQNGASYTWQFEARKAQILKCMECGSSHDTLQQLTAHMMVTGHFLKVTTSASKKGKQLVLDPVVEEKIQSIPLPPTTHTRLPASSIKKQPDSPAGSTTSEEKKEPEKEKPPVAGDAEKIKEESEDSLEKFEPSTLYPYLREEDLDDSPKGGLDILKSLENTVSTAISKAQNGAPSWGGYPSIHAAYQLPGTVKPLPAAVQSVQVQPSYAGGVKSLSSAEHNALLHSPGSLTPPPHKSNVSAMEELVEKVTGKVNIKKEERPPEKEKSSLAKAASPIAKENKDFPKTEEVSGKPQKKGPEAETGKAKKEGPLDVHTPNGTEPLKAKVTNGCNNLGIIMDHSPEPSFINPLSALQSIMNTHLGKVSKPVSPSLDPLAMLYKISNSMLDKPVYPATPVKQADAIDRYYYENSDQPIDLTKSKNKPLVSSVADSVASPLRESALMDISDMVKNLTGRLTPKSSTPSTVSEKSDADGSSFEEALDELSPVHKRKGRQSNWNPQHLLILQAQFASSLRETTEGKYIMSDLGPQERVHISKFTGLSMTTISHWLANVKYQLRRTGGTKFLKNLDTGHPVFFCNDCASQFRTASTYISHLETHLGFSLKDLSKLPLNQIQEQQNVSKVLTNKTLGPLGATEEDLGSTFQCKLCNRTFASKHAVKLHLSKTHGKSPEDHLIYVTELEKQ

SEQ ID NO: 15809 - protein, 1034 aa, Homo Sapiens
MPRRKQQAPKRAAGYAQEEQLKEEEEIKEEEEEEDSGSVAQLQGGNDTGTDEELETGPEQKGCFSYQNSPGSHLSNQDAENESLLSDASDQVSDIKSVCGRDASDKKAHTHVRLPNEAHNCMDKMTAVYANILSDSYWSGLGLGFKLSNSERRNCDTRNGSNKSDFDWHQDALSKSLQQNLPSRSVSKPSLFSSVQLYRQSSKMCGTVFTGASRFRCRQCSAAYDTLVELTVHMNETGHYQDDNRKKDKLRPTSYSKPRKRAFQDMDKEDAQKVLKCMFCGDSFDSLQDLSVHMIKTKHYQKVPLKEPVPTISSKMVTPAKKRVFDVNRPCSPDSTTGSFADSFSSQKNANLQLSSNNRYGYQNGASYTWQFEACKSQILKCMECGSSHDTLQQLTTHMMVTGHFLKVTSSASKKGKQLVLDPLAVEKMQSLSEAPNSDSLAPKPSSNSASDCTASTTELKKESKKERPEETSKDEKVVKSEDYEDPLQKPLDPTIKYQYLREEDLEDGSKGGGDILKSLENTVTTAINKAQNGAPSWSAYPSIHAAYQLSEGTKPPLPMGSQVLQIRPNLTNKLRPIAPKWKVMPLVSMPTHLAPYTQVKKESEDKDEAVKECGKESPHEEASSFSHSEGDSFRKSETPPEAKKTELGPLKEEEKLMKEGSEKEKPQPLEPTSALSNGCALANHAPALPCINPLSALQSVLNNHLGKATEPLRSPSCSSPSSSTISMFHKSNLNVMDKPVLSPASTRSASVSRRYLFENSDQPIDLTKSKSKKAESSQAQSCMSPPQKHALSDIADMVKVLPKATTPKPASSSRVPPMKLEMDVRRFEDVSSEVSTLHKRKGRQSNWNPQHLLILQAQFASSLFQTSEGKYLLSDLGPQERMQISKFTGLSMTTISHWLANVKYQLRKTGGTKFLKNMDKGHPIFYCSDCASQFRTPSTYISHLESHLGFQMKDMTRLSVDQQSKVEQEISRVSSAQRSPETIAAEEDTDSKFKCKLCCRTFVSKHAVKLHLSKTHSKSPEHHSQFVTDVDEE

SEQ ID NO: 15810 - protein, 1081 aa, Homo Sapiens
MPRRKQQAPRRAAAYVSEELKAAALVDEGLDPEEHTADGEPSAKYMCPEKELARACPSYQNSPAAEFSCHEMDSESHISETSDRMADFESGSIKNEEETKEVTVPLEDTTVSDSLEQMKAVYNNFLSNSYWSNLNLNLHQPSSEKNNGSSSSSSSSSSSCGSGSFDWHQSAMAKTLQQVSQSRMLPEPSLFSTVQLYRQSSKLYGSIFTGASKFRCKDCSAAYDTLVELTVHMNETGHYRDDNHETDNNNPKRWSKPRKRSLLEMEGKEDAQKVLKCMYCGHSFESLQDLSVHMIKTKHYQKVPLKEPVTPVAAKIIPATRKKASLELELPSSPDSTGGTPKATISDTNDALQKNSNPYITPNNRYGHQNGASYAWHFEARKSQILKCMECGSSHDTLQELTAHMMVTGHFIKVTNSAMKKGKPIVETPVTPTITTLLDEKVQSVPLAATTFTSPSNTPASISPKLNVEVKKEVDKEKAVTDEKPKQKDKPGEEEEKCDISSKYHYLTENDLEESPKGGLDILKSLENTVTSAINKAQNGTPSWGGYPSIHAAYQLPNMMKLSLGSSGKSTPLKPMFGNSEIVSPTKNQTLVSPPSSQTSPMPKTNFHAMEELVKKVTEKVAKVEEKMKEPDGKLSPPKRATPSPCSSEVGEPIKMEASSDGGFRSQENSPSPPRDGCKDGSPLAEPVENGKELVKPLASSLSGSTAIITDHPPEQPFVNPLSALQSVMNIHLGKAAKPSLPALDPMSMLFKMSNSLAEKAAVATPPPLQSKKADHLDRYFYHVNNDQPIDLTKGKSDKGCSLGSVLLSPTSTAPATSSSTVTTAKTSAVVSFMSNSPLRENALSDISDMLKNLTESHTSKSSTPSSISEKSDIDGATLEEAEESTPAQKRKGRQSNWNPQHLLILQAQFAASLRQTSEGKYIMSDLSPQERMHISRFTGLSMTTISHWLANVKYQLRRTGGTKFLKNLDTGHPVFFCNDCASQIRTPSTYISHLESHLGFRLRDLSKLSTEQINSQIAQTKSPSEKMVTSSPEEDLGTSYQCKLCNRTFASKHAVKLHLSKTHGKSPEDHLLYVSELEKQ

SEQ ID NO: 15811 - protein, 371 aa, Homo Sapiens; identical to SEQ ID NO: 15392

SEQ ID NO: 15812 - protein, 905 aa, Homo Sapiens
MEGESSRFEIHTPVSDKKKKKCSIHKERPQKHSHEIFRDSSLVNEQSQITRRKKRKKDFQHLISSPLKKSRICDETANATSTLKKRKKRRYSALEVDEEAGVTVVLVDKENINNTPKHFRKDVDVVCVDMSIEQKLPRKPKTDKFQVLAKSHAHKSEALHSKVREKKNKKHQRKAASWESQRARDTLPQSESHQEESWLSVGPGGEITELPASAHKNKSKKKKKKSSNREYETLAMPEGSQAGREAGTDMQESQPTVGLDDETPQLLGPTHKKKSKKKKKKKSNHQEFEALAMPEGSQVGSEVGADMQESRPAVGLHGETAGIPAPAYKNKSKKKKKKSNHQEFEAVAMPESLESAYPEGSQVGSEVGTVEGSTALKGFKESNSTKKKSKKRKLTSVKRARVSGDDFSVPSKNSESTLFDSVEGDGAMMEEGVKSRPRQKKTQACLASKHVQEAPRLEPANEEHNVETAEDSEIRYLSADSGDADDSDADLGSAVKQLQEFIPNIKDRATSTIKRMYRDDLERFKEFKAQGVAIKFGKFSVKENKQLEKNVEDFLALTGIESADKLLYTDRYPEEKSVITNLKRRYSFRLHIGRNIARPWKLIYYRAKKMFDVNNYKGRYSEGDTEKLKMYHSLLGNDWKTIGEMVARSSLSVALKFSQISSQRNRGAWSKSETRKLIKAVEEVILKKMSPQELKEVDSKLQENPESCLSIVREKLYKGISWVEVEAKVQTRNWMQCKSKWTEILTKRMTNGRRIYYGMNALRAKVSLIERLYEINVEDTNEIDWEDLASAIGDVPPSYVQTKFSRLKAVYVPFWQKKTFPEIIDYLYETTLPLLKEKLEKMMEKKGTKIQTPAAPKQVFPFRDIFYYEDDSEGEDIEKESEGQAPCMAHACNSSTLGGQGRWII

SEQ ID NO: 15813 - protein, 373 aa, Homo Sapiens; identical to SEQ ID NO: 14989

SEQ ID NO: 15814 - protein, 1162 aa, Homo Sapiens
MEEVRCPEHGTFCFLKTGVRDGPNKGKSFYVCRADTCSFVRATDIPVSHCLLHEDFVVELQGLLLPQDKKEYRLFFRCIRSKAEGKRWCGSIPWQDPDSKEHSVSNKSQHASETFHHSSNWLRNPFKVLDKNQEPALWKQLIKGEGEEKKADKKQREKGDQLFDQKKEQKPEMMEKDLSSGLVPKKKQSVVQEKKQEEGAEIQCEAETGGTHKRDFSEIKSQQCQGNELTRPSASSQEKSSGKSQDVQRESEPLREKVTQLLPQNVHSHNSISKPQKGGPLNKEYTNWEAKETKAKDGPSIQATQKSLPQGHFQERPETHSVPAPGGPAAQAAPAAPGLSLGEGREAATSSDDEEEDDVVFVSSKPGSPLLFDSTLDLETKENLQFPDRSVQRKVSPASGVSKKVEPSDPVARRVYLTTQLKQKKSTLASVNIQALPDKGQKLIKQIQELEEVLSGLTLSPEQGTNEKSNSQVPQQSHFTKTTTGPPHLVPPQPLPRRGTQPVGSLELKSACQVTAGGSSQCYRGHTNQDHVHAVWKITSEAIGQLHRSLESCPGETVVAEDPAGLKVPLLLHQKQALAWLLWRESQKPQGGILADDMGLGKTLTMIALILTQKNQEKKEEKEKSTALTWLSKDDSCDFTSHGTLIICPASLIHHWKNEVEKRVNSNKLRVYLYHGPNRDSRARVLSTYDIVITTYSLVAKEIPTNKQEAEIPGANLNVEGTSTPLLRIAWARIILDEAHNVKNPRVQTSIAVCKLQACARWAVTGTPIQNNLLDMYSLLKFLRCSPFDEFNLWRSQVDNGSKKGGERLSILTKSLLLRRTKDQLDSTGRPLVILPQRKFQLHHLKLSEDEETVYNVFFARSRSALQSYLKRHESRGNQSGRSPNNPFSRVALEFGSEEPRHSEAADSPRSSTVHILSQLLRLRQCCCHLSLLKSALDPMELKGEGLVLSLEEQLSALTLSELRDSEPSSTVSLNGTFFKMELFEGMRESTKISSLLAELEAIQRNSASQKSVIVSQWTNMLKVVALHLKKHGLTYATIDGSVNPKQRMDLVEAFNHSRGPQVMLISLLAGGVGLNLTGGNHLFLLDMHWNPSLEDQACDRIYRVGQQKDVVIHRFVCEGTVEEKILQLQEKKKDLAKQVLSGSGESVTKLTLADLRVLFGI

SEQ ID NO: 15815 - protein, 506 aa, Homo Sapiens
MTSKPHSDWIPYSVLDDEGRNLRQQKLDRQRALLEQKQKKKRQEPLMVQANADGRPRSRRARQSEEQAPLVESYLSSSGSTSYQVQEADSLASVQLGATRPTAPASAKRTKAAATAGGQGGAARKEKKGKHKGTSGPAALAEDKSEAQGPVQILTVGQSDHAQDAGETAAGGGERPSGQDLRATMQRKGISSSMSFDEDEEDEEENSSSSSQLNSNTRPSSATSRKSVREAASAPSPTAPEQPVDVEVQDLEEFALRPAPQGITIKCRITRDKKGMDRGMYPTYFLHLDREDGKKVFLLAGRKRKKSKTSNYLISVDPTDLSRGGDSYIGKLRSNLMGTKFTVYDNGVNPQKASSSTLESGTLRQELAAVCYETNVLGFKGPRKMSVIVPGMNMVHERVSIRPRNEHETLLARWQNKNTESIIELQNKTPVWNDDTQSYVLNFHGRVTQASVKNFQIIHGNDPDYIVMQFGRVAEDVFTMDYNYPLCALQAFAIALSSFDSKLACE

SEQ ID NO: 15816 - protein, 202 aa, Homo Sapiens
MMQDVSSSPVSPADDSLSNSEEEPDRQQPPSGKRGGRKRRSSRRSAGGGAGPGGAAGGGVGGGDEPGSPAQGKRGKKSAGCGGGGGAGGGGGSSSGGGSPQSYEELQTQRVMANVRERQRTQSLNEAFAALRKIIPTLPSDKLSKIQTLKLAARYIDFLYQVLQSDELDSKMASCSYVAHERLSYAFSVWRMEGAWSMSASH

SEQ ID NO: 15817 - protein, 160 aa, Homo Sapiens
MEEGSSSPVSPVDSLGTSEEELERQPKRFGRKRRYSKKSSEDGSPTPGKRGKKGSPSAQSFEELQSQRILANVRERQRTQSLNEAFAALRKIIPTLPSDKLSKIQTLKLAARYIDFLYQVLQSDEMDNKMTSCSYVAHERLSYAFSVWRMEGAWSMSASH

SEQ ID NO: 15818 - protein, 540 aa, Homo Sapiens
MAWVLKMDEVIESGLVHDFDASLSGIGQELGAGAYSMSDVLALPIFKQEDSSLPLDGETEHPPFQYVMCAATSPAVKLHDETLTYLNQGQSYEIRMLDNRKMGDMPEINGKLVKSIIRVVFHDRRLQYTEHQQLEGWKWNRPGDRLLDLDIPMSVGIIDTRTNPSQLNAVEFLWDPAKRTSAFIQVHCISTEFTPRKHGGEKGVPFRIQVDTFKQNENGEYTDHLHSASCQIKVFKPKGADRKQKTDREKMEKRTAHEKEKYQPSYDTTILTEMRLEPIIEDAVEHEQKKSSKRTLPADYGDSLAKRGSCSPWPDAPTAYVNNSPSPAPTFTSPQQSTCSVPDSNSSSPNHQGDGASQTSGEQIQPSATIQETQQWLLKNRFSSYTRLFSNFSGADLLKLTKEDLVQICGAADGIRLYNSLKSRSVRPRLTIYVCREQPSSTVLQGQQQAASSASENGSGAPYVYHAIYLEEMIASEVARKLALVFNIPLHQINQVYRQGPTGIHILVSDQMVQNFQDESCFLFSTVKAESSDGIHIILK

SEQ ID NO: 15819 - protein, 764 aa, Homo Sapiens
MNGEADCPTDLEMAAPKGQDRWSQEDMLTLLECMKNNLPSNDSSKFKTTESHMDWEKVAFKDFSGDMCKLKWVEISNEVRKFRTLTELILDAQEHVKNPYKGKKLKKHPDFPKKPLTPYFRFFMEKRAKYAKLHPEMSNLDLTKILSKKYKELPEKKKMKYIQDFQREKQEFERNLARFREDHPDLIQNAKKSDIPEKPKTPQQLWYTHEKKVYLKVRPDATTKEVKDSLGKQWSQLSDKKRLKWIHKALEQRKEYEEIMRDYIQKHPELNISEEGITKSTLTKAERQLKDKFDGRPTKPPPNSYSLYCAELMANMKDVPSTERMVLCSQQWKLLSQKEKDAYHKKCDQKKKDYEVELLRFLESLPEEEQQRVLGEEKMLNINKKQATSPASKKPAQEGGKGGSEKPKRPVSAMFIFSEEKRRQLQEERPELSESELTRLLARMWNDLSEKKKAKYKAREAALKAQSERKPGGEREERGKLPESPKRAEEIWQQSVIGDYLARFKNDRVKALKAMEMTWNNMEKKEKLMWIKKAAEDQKRYERELSEMRAPPAATNSSKKMKFQGEPKKPPMNGYQKFSQELLSNGELNHLPLKERMVEIGSRWQRISQSQKEHYKKLAEEQQKQYKVHLDLWVKSLSPQDRAAYKEYISNKRKSMTKLRGPNPKSSRTTLQSKSESEEDDEEDEDDEDEDEEEEDDENGDSSEDGGDSSESSSEDESEDGDENEEDDEDEDDDEDDDEDEDNESEGSSSSSSSSGDSSDSDSN

SEQ ID NO: 15820 - protein, 393 aa, Homo Sapiens
MALPRSQGHWSNKDILRLLECMENNRPSDDNSTFSSTQSHMDWGKVAFKNFSGEMCRLKWLEISCNLRKFGTLKELVLEAKKCVKKMNKSQKYRNGPDFPKRPLTAYNRFFKESWPQYSQMYPGMRSQELTKILSKKYRELPEQMKQKYIQDFRKEKQEFEEKLARFREEHPDLVQKAKKSSVSKRTQNKVQKKFQKNIEEVRSLPKTDRFFKKVKFHGEPQKPPMNGYHKFHQDSWSSKEMQHLSVRERMVEIGRRWQRIPQSQKDHFKSQAEELQKQYKVKLDLWLKTLSPENYAAYKESTYAKGKNMAMTGGPDPRLKQADPQSSSAKGLQEGFGEGQGLQAAGTDSSQTIWVNCHVSMEPEENRKKDREKEESSNSSDCSSGEEIEVDV

SEQ ID NO: 15821 - protein, 400 aa, Homo Sapiens
MPAKDIKVALPRSQGHWSNADILRLLECMENNLPYDDNGTFSSTQSHMDWGKVAFKNFSGEMCRLKWLEISCSLRKFSTLKKLVLEAKKCVKNTNKSQKGRNHPDFPKRLLTAYIRFFKENWPQYSQMYPGMRSQEVTKILSKKYKELPEQMKQKHIQDFRKEKQEFEEKLARFREEHPDLDQKGKKSDICKRVQTKVQKKVQKNIEEVRSLPKTDQFFKKVKFHGEPQKPPMNGYQKFHQDSWSSKELQHLSLRERMVEIGRRWQRIPQSQKDHYKSQAELLQKEYKVELDLWLKTLSPEDYAAYKESTYAKGKNMAMMGGPAPSLKQTDPQSSSAKGLQEGFGEGQGLQAAGTEASQTIWVNCQVSMEPEDNRKKDGEEEESSNSLDCSSGEDMEVDV

SEQ ID NO: 15822 - protein, 531 aa, Homo Sapiens
MMDGRLLEHPHAQFGGSLGGVVGFPYPLGHHHVYELAGHQLQSAAAAASVPFSIDGLLGGSCAAAASVVNPTPLLPAACGVGGDGQPFKLSDSGDPDKESPGCKRRRTRTNFTGWQLEELEKAFNESHYPDVFMREALALRLDLVESRVQVWFQNRRAKWRKKENTKKGPGRPAHNSHPTTCSGEPMDPEEIARKELEKMEKKKRKHEKKLLKSQGRHLHSPGGLSLHSAPSSDSDSGGGGLSPEPPEPPPPAAKGPGAHASGAAGTAPAPPGEPPAPGTCDPAFYPSQRSGAGPQPRPGRPADKDAASCGPGAAVAAVERGAAGLPKASPFSVESLLSDSPPRRKAASNAAAAAAAGLDFAPGLPCAPRTLIGKGHFLLYPITQPLGFLVPQAALKGGAGLEPAPKDAPPAPAVPPAPPAQASFGAFSGPGGAPDSAFARRSPDAVASPGAPAPAPAPFRDLASAAATEGGGGDCADAGTAGPAPPPPAPSPRPGPRPPSPAEEPATCGVPEPGAAAGPSPPEGEELDMD

SEQ ID NO: 15823 - protein, 810 aa, Homo Sapiens
MSKGPGPGGSAASSAPPAATAQVLQAQPEKPQHYTYLKEFRTEQCPLFVQHKCTQHRPYTCFHWHFVNQRRRRSIRRRDGTFNYSPDVYCTKYDEATGLCPEGDECPFLHRTTGDTERRYHLRYYKTGICIHETDSKGNCTKNGLHCAFAHGPHDLRSPVYDIRELQAMEALQNGQTTVEGSIEGQSAGAASHAMIEKILSEEPRWQETAYVLGNYKTEPCKKPPRLCRQGYACPYYHNSKDRRRSPRKHKYRSSPCPNVKHGDEWGDPGKCENGDACQYCHTRTEQQFHPEIYKSTKCNDMQQSGSCPRGPFCAFAHVEQPPLSDDLQPSSAVSSPTQPGPVLYMPSAAGDSVPVSPSSPHAPDLSALLCRNSSLGSPSNLCGSPPGSIRKPPNLEGIVFPGESGLAPGSYKKAPGFEREDQVGAEYLKNFKCQAKLKPHSLEPRSQEQPLLQPKQDMLGILPAGSPLTSSISSSITSSLAATPPSPVGTSSVPGMNANALPFYPTSDTVESVIESALDDLDLNEFGVAALEKTFDNSTVPHPGSITIGGSLLQSSAPVNIPGSLGSSASFHSASPSPPVSLSSHFLQQPQGHLSQSENTFLGTSASHGSLGLNGMNSSIWEHFASGSFSPGTSPAFLSGPGAAELARLRQELDEANSTIKQWEESWKQAKQACDAWKKEAEEAGERASAAGAECELAREQRDALEVQVKKLQEELERLHAGPEPQALPAFSDLEALSLSTLYSLQKQLRAHLEQVDKAVFHMQSVKCLKCQEQKRAVLPCQHAALCELCAEGSECPICQPGRAHTLQS

SEQ ID NO: 15824 - protein, 680 aa, Homo Sapiens
MPSVSKAAAAALSGSPPQTEKPTHYRYLKEFRTEQCPLFSQHKCAQHRPFTCFHWHFLNQRRRRPLRRRDGTFNYSPDVYCSKYNEATGVCPDGDECPYLHRTTGDTERKYHLRYYKTGTCIHETDARGHCVKNGLHCAFAHGPLDLRPPVCDVRELQAQEALQNGQLGGGEGVPDLQPGVLASQAMIEKILSEDPRWQDANFVLGSYKTEQCPKPPRLCRQGYACPHYHNSRDRRRNPRRFQYRSTPCPSVKHGDEWGEPSRCDGGDGCQYCHSRTEQQFHPESTKCNDMRQTGYCPRGPFCAFAHVEKSLGMVNEWGCHDLHLTSPSSTGSGQPGNAKRRDSPAEGGPRGSEQDSKQNHLAVFAAVHPPAPSVSSSVASSLASSAGSGSSSPTALPAPPARALPLGPASSTVEAVLGSALDLHLSNVNIASLEKDLEEQDGHDLGAAGPRSLAGSAPVAIPGSLPRAPSLHSPSSASTSPLGSLSQPLPGPVGSSAMTPPQQPPPLRSEPGTLGSAASSYSPLGLNGVPGSIWDFVSGSFSPSPSPILSAGPPSSSSASPNGAELARVRRQLDEAKRKIRQWEESWQQVKQVCDAWQREAQEAKERARVADSDRQLALQKKEEVEAQVIFQLRAKQCVACRERAHGAVLRPCQHHILCEPCAATAPECPYCKGQPLQW

SEQ ID NO: 15825 - protein, 310 aa, Homo Sapiens
MKGQQKTAETEEGTVQIQEGAVATGEDPTSVAIASIQSAATFPDPNVKYVFRTENGGQVMYRVIQVSEGQLDGQTEGTGAISGYPATQSMTQAVIQGAFTSDDAVDTEGTAAETHYTYFPSTAVGDGAGGTTSGSTAAVVTTQGSEALLGQATPPGTGQFFVMMSPQEVLQGGSQRSIAPRTHPYSPKSEAPRTTRDEKRRAQHNEVERRRRDKINNWIVQLSKIIPDCSMESTKSGQSKGGILSKACDYIQELRQSNHRLSEELQGLDQLQLDNDVLRQQVEDLKNKNLLLRAQLRHHGLEVVIKNDSN

SEQ ID NO: 15826 - protein, 346 aa, Homo Sapiens
MDMLDPGLDPAASATAAAAASHDKGPEAEEGVELQEGGDGPGAEEQTAVAITSVQQAAFGDHNIQYQFRTETNGGQVTYRVVQVTDGQLDGQGDTAGAVSVVSTAAFAGGQQAVTQVGVDGAAQRPGPAAASVPPGPAAPFPLAVIQNPFSNGGSPAAEAVSGEARFAYFPASSVGDTTAVSVQTTDQSLQAGGQFYVMMTPQDVLQTGTQRTIAPRTHPYSPKIDGTRTPRDERRRAQHNEVERRRRDKINNWIVQLSKIIPDCNADNSKTGASKGGILSKACDYIRELRQTNQRMQETFKEAERLQMDNELLRQQIEELKNENALLRAQLQQHNLEMVGEGTRQ

SEQ ID NO: 15827 - protein, 2245 aa, Homo Sapiens
MPEMTENETPTKKQHRKKNRETHNAVERHRKKKINAGINRIGELIPCSPALKQSKNMILDQAFKYITELKRQNDELLLNGGNNEQAEEIKKLRKQLEEIQKENGRYIELLKANDICLYDDPTIHWKGNLKNSKVSVVIPSDQVQKKIIVYSNGNQPGGNSQGTAVQGITFNVSHNLQKQTANVVPVQRTCNLVTPVSISGVYPSENKPWHQTTVPALATNQPVPLCLPAAISAQSILELPTSESESNVLGATSGSLIAVSIESEPHQHHSLHTCLNDQNSSENKNGQENPKVLKKMTPCVTNIPHSSSATATKVHHGNKSCLSIQDFRGDFQNTFVVSVTTTVCSQPPRTAGDSSPMSISKSADLTSTATVVASSAPGVGKATIPISTLSGNPLDNGWTLSCSLPSSSVSTSDLKNINSLTRISSAGNTQTTWTTLQLAGNTIQPLSQTPSSAVTPVLNESGTSPTTSNHSRYVATDINLNNSFPADGQPVEQVVVTLPSCPSLPMQPLIAQPQVKSQPPKNILPLNSAMQVIQMAQPVGSAVNSAPTNQNVIILQPPSTTPCPTVMRAEVSNQTVGQQIVIIQAANQNPLPLLPAPPPGSVRLPINGANTVIGSNNSVQNVPTPQTFGGKHLVHILPRPSSLSASNSTQTFSVTMSNQQPQTISLNGQLFALQPVMSSSGTTNQTPMQIIQPTTSEDPNTNVALNTFGALASLNQSISQMAGQSCVQLSISQPANSQTAANSQTTTANCVSLTTTAAPPVTTDSSATLASTYNLVSTSSMNTVACLPNMKSKRLNKKPGGRKHLAANKSACPLNSVRDVSKLDCPNTEGSAEPPCNDGLLESFPAVLPSVSVSQANSVSVSASHSLGVLSSESLIPESVSKSKSAEKSSPPSQESVTSEHFAMAAAKSKDSTPNLQQETSQDKPPSSLALSDAAKPCASANVLIPSPSDPHILVSQVPGLSSTTSTTSTDCVSEVEIIAEPCRVEQDSSDTMQTTGLLKGQGLTTLLSDLAKKKNPQKSSLSDQMDHPDFSSENPKIVDSSVNLHPKQELLLMNNDDRDPPQHHSCLPDQEVINGSLINGRQADSPMSTSSGSSRSFSVASMLPETTREDVTSNATTNTCDSCTFVEQTDIVALAARAIFDQENLEKGRVGLQADIREVASKPSEASLLEGDPPFKSQIPKESGTGQAEATPNEFNSQGSIEATMERPLEKPSCSLGIKTSNASLQDSTSQPPSITSLSVNNLIHQSSISHPLASCAGLSPTSEQTTVPATVNLTVSSSSYGSQPPGPSLMTEYSQEQLNTMTSTIPNSQIQEPLLKPSHESRKDSAKRAVQDDLLLSSAKRQKHCQPAPLRLESMSLMSRTPDTISDQTQMMVSQIPPNSSNSVVPVSNPAHGDGLTRLFPPSNNFVTPALRQTEVQCGSQPSVAEQQQTQASQHLQALQQHVPAQGVSHLHSNHLYIKQQQQQQQQQQQQQQQQQAGQLRERHHLYQMQHHVPHAESSVHSQPHNVHQQRTLQQEVQMQKKRNLVQGTQTSQLSLQPKHHGTDQSRSKTGQPHPHHQQMQQQMQQHFGSSQTEKSCENPSTSRNHHNHPQNHLNQDIMHQQQDVGSRQQGSGVSSEHVSGHNPMQRLLTSRGLEQQMVSQPSIVTRSSDMTCTPHRPERNRVSSYSAEALIGKTSSNSEQRMGISIQGSRVSDQLEMRSYLDVPRNKSLAIHNMQGRVDHTVASDIRLSDCQTFKPSGASQQPQSNFEVQSSRNNEIGNPVSSLRSMQSQAFRISQNTGPPPIDRQKRLSYPPVQSIPTGNGIPSRDSENTCHQSFMQSLLAPHLSDQVIGSQRSLSEHQRNTQCGPSSAIEYNCPPTHENVHIRRESESQNRESCDMSLGAINTRNSTLNIPFSSSSSSGDIQGRNTSPNVSVQKSNPMRITESHATKGHMNPPVTTNMHGVARPALPHPSVSHGNGDQGPAVRQANSSVPQRSRHPLQDSSGSKIRQPERNRSGNQRQSTVFDPSLPHLPLSTGGSMILGRQQPATEKRGSIVRFMPDSPQVPNDNSGPDQHTLSQNFGFSFIPEGGMNPPINANASFIPQVTQPSATRTPALIPVDPQNTLPSFYPPYSPAHPTLSNDISIPYFPNQMFSNPSTEKVNSGSLNNRFGSILSPPRPVGFAQPSFPLLPDMPPMHMTNSHLSNFNMTSLFPEIATVLPDGSAMSPLLTIANSSASDSSKQSSNRPAHNISHILGHDCSSAV

SEQ ID NO: 15828 - protein, 341 aa, Homo Sapiens
MLLRPRRPPPLAPPAPPSPASPDPEPRTPGDAPGTPPRRPASPSALGELGLPVSPGSAQRTPWSARETELLLGTLLQPAVWRALLLDRRQALPTYRRVSAALAQQQVRRTPAQCRRRYKFLKDKFREAHGQPPGPFDEQIRKLMGLLGDNGRKRPRRRSPGSGRPQRARRPVPNAHAPAPSEPDATPLPTARDRDADPTWTLRFSPSPPKSADASPAPGSPPAPAPTALATCIPEDRAPVRGPGSPPPPPAREDPDSPPGRPEDCAPPPAAPPSLNTALLQTLGHLGDIANILGPLRDQLLTLNQHVEQLRGAFDQTVSLAVGFILGSAAAERGVLRDPCQ

SEQ ID NO: 15829 - protein, 334 aa, Homo Sapiens
MFGKPDKMDVRCHSDAEAARVSKNAHKESRESKGAEGNLPAAFLKEPQGAFSASGAAEDCNKSKSNSAADPDYCRRILVRDAKGSIREIILPKGLDLDRPKRTRTSFTAEQLYRLEMEFQRCQYVVGRERTELARQLNLSETQVKVWFQNRRTKQKKDQGKDSELRSVVSETAATCSVLRLLEQGRLLSPPGLPALLPPCATGALGSALRGPSLPALGAGAAAGSAAAAAAAAPGPAGAASPHPPAVGGAPGPGPAGPGGLHAGAPAAGHSLFSLPVPSLLGSVASRLSSAPLTMAGSLAGNLQELSARYLSSSAFEPYSRTNNKEGAEKKALD

SEQ ID NO: 15830 - protein, 290 aa, Homo Sapiens
MGDGGAERDRGPARRAESGGGGGRCGDRSGAGDLRADGGGHSPTEVAGTSASSPAGSRESGADSDGQPGPGEADHCRRILVRDAKGTIREIVLPKGLDLDRPKRTRTSFTAEQLYRLEMEFQRCQYVVGRERTELARQLNLSETQVKVWFQNRRTKQKKDQSRDLEKRASSSASEAFATSNILRLLEQGRLLSVPRAPSLLALTPSLPGLPASHRGTSLGDPRNSSPRLNPLSSASASPPLPPPLPAVCFSSAPLLDLPAGYELGSSAFEPYSWLERKVGSASSCKKANT

SEQ ID NO: 15831 - protein, 427 aa, Homo Sapiens
MEAMAASTSLPDPGDFDRNVPRICGVCGDRATGFHFNAMTCEGCKGFFRRSMKRKALFTCPFNGDCRITKDNRRHCQACRLKRCVDIGMMKEFILTDEEVQRKREMILKRKEEEALKDSLRPKLSEEQQRIIAILLDAHHKTYDPTYSDFCQFRPPVRVNDGGGSHPSRPNSRHTPSFSGDSSSSCSDHCITSSDMMDSSSFSNLDLSEEDSDDPSVTLELSQLSMLPHLADLVSYSIQKVIGFAKMIPGFRDLTSEDQIVLLKSSAIEVIMLRSNESFTMDDMSWTCGNQDYKYRVSDVTKAGHSLELIEPLIKFQVGLKKLNLHEEEHVLLMAICIVSPDRPGVQDAALIEAIQDRLSNTLQTYIRCRHPPPGSHLLYAKMIQKLADLRSLNEEHSKQYRCLSFQPECSMKLTPLVLEVFGNEIS

SEQ ID NO: 15832 - protein, 258 aa, Homo Sapiens
MRLSSSPPRGPQQLSSFGSVDWLSQSSCSGPTHTPRPADFSLGSLPGPGQTSGAREPPQAVSIKEAAGSSNLPAPERTMAGLSKEPNTLRAPRVRTAFTMEQVRTLEGVFQHHQYLSPLERKRLAREMQLSEVQIKTWFQNRRMKHKRQMQDPQLHSPFSGSLHAPPAFYSTSSGLANGLQLLCPWAPLSGPQALMLPPGSFWGLCQVAQEALASAGASCCGQPLASHPPTPGRPSLGPALSTGPRGLCAMPQTGDAF

SEQ ID NO: 15833 - protein, 521 aa, Homo Sapiens
MEANWTAFLFQAHEASHHQQQAAQNSLLPLLSSAVEPPDQKPLLPIPITQKPQGAPETLKDAIGIKKEKPKTSFVCTYCSKAFRDSYHLRRHESCHTGIKLVSRPKKTPTTVVPLISTIAGDSSRTSLVSTIAGILSTVTTSSSGTNPSSSASTTAMPVTQSVKKPSKPVKKNHACEMCGKAFRDVYHLNRHKLSHSDEKPFECPICNQRFKRKDRMTYHVRSHEGGITKPYTCSVCGKGFSRPDHLSCHVKHVHSTERPFKCQTCTAAFATKDRLRTHMVRHEGKVSCNICGKLLSAAYITSHLKTHGQSQSINCNTCKQGISKTCMSEETSNQKQQQQQQQQQQQQQQQQQQHVTSWPGKQVETLRLWEEAVKARKKEAANLCQTSTAATTPVTLTTPFSITSSVSSGTMSNPVTVAAAMSMRSPVNVSSAVNITSPMNIGHPVTITSPLSMTSPLTLTTPVNLPTPVTAPVNIAHPVTITSPMNLPTPMTLAAPLNIAMRPVESMPFLPQALPTSPPW

SEQ ID NO: 15834 - protein, 365 aa, Homo Sapiens
MTGRDSLSDGRTSSRALVPGGSPRGSRPRGFAITDLLGLEAELPAPAGPGQGSGCEGPAVAPCPGPGLDGSSLARGALPLGLGLLCGFGTQPPAAARAPCLLLADVPFLPPRGPEPAAPLAPSRPPPALGRQKRSDSVSTSDEDSQSEDRNDLKASPTLGKRKKRRHRTVFTAHQLEELEKAFSEAHYPDVYAREMLAVKTELPEDRIQVWFQNRRAKWRKREKRWGGSSVMAEYGLYGAMVRHCIPLPDSVLNSAEGGLLGSCAPWLLGMHKKSMGMIRKPGSEDKLAGLWGSDHFKEGSSQSESGSQRGSDKVSPENGLEDVAIDLSSSARQETKKVHPGAGAQGGSNSTALEGPQPGKVGAT

SEQ ID NO: 15835 - protein, 361 aa, Homo Sapiens
MTGKAGEALSKPKSETVAKSTSGGAPARCTGFGIQEILGLNKEPPSSHPRAALDGLAPGHLLAARSVLSPAGVGGMGLLGPGGLPGFYTQPTFLEVLSDPQSVHLQPLGRASGPLDTSQTASSDSEDVSSSDRKMSKSALNQTKKRKKRRHRTIFTSYQLEELEKAFNEAHYPDVYAREMLAMKTELPEDRIQVWFQNRRAKWRKREKCWGRSSVMAEYGLYGAMVRHSIPLPESILKSAKDGIMDSCAPWLLGMHKKSLEAAAESGRKPEGERQALPKLDKMEQDERGPDAQAAISQEELRENSIAVLRAKAQEHSTKVLGTVSGPDSLARSTEKPEEEEAMDEDRPAERLSPPQLEDMA

SEQ ID NO: 15836 - protein, 1129 aa, Homo Sapiens
MPATRKPMRYGHTEGHTEVCFDDSGSFIVTCGSDGDVRIWEDLDDDDPKFINVGEKAYSCALKSGKLVTAVSNNTIQVHTFPEGVPDGILTRFTTNANHVVFNGDGTKIAAGSSDFLVKIVDVMDSSQQKTFRGHDAPVLSLSFDPKDIFLASASCDGSVRVWQISDQTCAISWPLLQKCNDVINAKSICRLAWQPKSGKLLAIPVEKSVKLYRRESWSHQFDLSDNFISQTLNIVTWSPCGQYLAAGSINGLIIVWNVETKDCMERVKHEKGYAICGLAWHPTCGRISYTDAEGNLGLLENVCDPSGKTSSSKVSSRVEKDYNDLFDGDDMSNAGDFLNDNAVEIPSFSKGIINDDEDDEDLMMASGRPRQRSHILEDDENSVDISMLKTGSSLLKEEEEDGQEGSIHNLPLVTSQRPFYDGPMPTPRQKPFQSGSTPLHLTHRFMVWNSIGIIRCYNDEQDNAIDVEFHDTSIHHATHLSNTLNYTIADLSHEAILLACESTDELASKLHCLHFSSWDSSKEWIIDLPQNEDIEAICLGQGWAAAATSALLLRLFTIGGVQKEVFSLAGPVVSMAGHGEQLFIVYHRGTGFDGDQCLGVQLLELGKKKKQILHGDPLPLTRKSYLAWIGFSAEGTPCYVDSEGIVRMLNRGLGNTWTPICNTREHCKGKSDHYWVVGIHENPQQLRCIPCKGSRFPPTLPRPAVAILSFKLPYCQIATEKGQMEEQFWRSVIFHNHLDYLAKNGYEYEESTKNQATKEQQELLMKMLALSCKLEREFRCVELADLMTQNAVNLAIKYASRSRKLILAQKLSELAVEKAAELTATQVEEEEEEEDFRKKLNAGYSNTATEWSQPRFRNQVEEDAEDSGEADDEEKPEIHKPGQNSFSKSTNSSDVSAKSGAVTFSSQGRVNPFKVSASSKEPAMSMNSARSTNILDNMGKSSKKSTALSRTTNNEKSPIIKPLIPKPKPKQASAASYFQKRNSQTNKTEEVKEENLKNVLSETPAICPPQNTENQRPKTGFQMWLEENRSNILSDNPDFSDEADIIKEGMIRFRVLSTEERKVWANKAKGETASEGTEAKKRKRVVDESDETENQEEKAKENLNLSKKQKPLDFSTNQKLSAFAFKQE

SEQ ID NO: 15837 - protein, 1365 aa, Homo Sapiens
MEFSIKQSPLSVQSVVKCIKMKQAPEILGSANGKTPSCEVNRECSVFLSKAQLSSSLQEGVMQKFNGHDALPFIPADKLKDLTSRVFNGEPGAHDAKLRFESQEMKGIGTPPNTTPIKNGSPEIKLKITKTYMNGKPLFESSICGDSAADVSQSEENGQKPENKARRNRKRSIKYDSLLEQGLVEAALVSKISSPSDKKIPAKKESCPNTGRDKDHLLKYNVGDLVWSKVSGYPWWPCMVSADPLLHSYTKLKGQKKSARQYHVQFFGDAPERAWIFEKSLVAFEGEGQFEKLCQESAKQAPTKAEKIKLLKPISGKLRAQWEMGIVQAEEAASMSVEERKAKFTFLYVGDQLHLNPQVAKEAGIAAESLGEMAESSGVSEEAAENPKSVREECIPMKRRRRAKLCSSAETLESHPDIGKSTPQKTAEADPRRGVGSPPGRKKTTVSMPRSRKGDAASQFLVFCQKHRDEVVAEHPDASGEEIEELLRSQWSLLSEKQRARYNTKFALVAPVQAEEDSGNVNGKKRNHTKRIQDPTEDAEAEDTPRKRLRTDKHSLRKRDTITDKTARTSSYKAMEAASSLKSQAATKNLSDACKPLKKRNRASTAASSALGFSKSSSPSASLTENEVSDSPGDEPSESPYESADETQTEVSVSSKKSERGVTAKKEYVCQLCEKPGSLLLCEGPCCGAFHLACLGLSRRPEGRFTCSECASGIHSCFVCKESKTDVKRCVVTQCGKFYHEACVKKYPLTVFESRGFRCPLHSCVSCHASNPSNPRPSKGKMMRCVRCPVAYHSGDACLAAGCSVIASNSIICTAHFTARKGKRHHAHVNVSWCFVCSKGGSLLCCESCPAAFHPDCLNIEMPDGSWFCNDCRAGKKLHFQDIIWVKLGNYRWWPAEVCHPKNVPPNIQKMKHEIGEFPVFFFGSKDYYWTHQARVFPYMEGDRGSRYQGVRGIGRVFKNALQEAEARFREIKLQREARETQESERKPPPYKHIKVNKPYGKVQIYTADISEIPKCNCKPTDENPCGFDSECLNRMLMFECHPQVCPAGEFCQNQCFTKRQYPETKIIKTDGKGWGLVAKRDIRKGEFVNEYVGELIDEEECMARIKHAHENDITHFYMLTIDKDRIIDAGPKGNYSRFMNHSCQPNCETLKWTVNGDTRVGLFAVCDIPAGTELTFNYNLDCLGNEKTVCRCGASNCSGFLGDRPKTSTTLSSEEKGKKTKKKTRRRRAKGEGKRQSEDECFRCGDGGQLVLCDRKFCTKAYHLSCLGLGKRPFGKWECPWHHCDVCGKPSTSFCHLCPNSFCKEHQDGTAFSCTPDGRSYCCEHDLGAASVRSTKTEKPPPEPGKPKGKRRRRRGWRRVTEGK

SEQ ID NO: 15838 - protein, 1651 aa, Homo Sapiens
MEGSLAGSLAAPDRPQGPERLPGPAPRENIEGGAEAAEGEGGIFRSTRYLPVTKEGPRDILDGRGGISGTPDGRGPWEHPLVQEAGEGILSERRFEDSVIVRTMKPHAELEGSRRFLHHRGEPRLLEKHAQGRPRFDWLQDEDEQGSPQDAGLHLDLPAQPPPLAPFRRVFVPVEDTPKTLDMAVVGGREDLEDLEGLAQPSEWGLPTSASEVATQTWTVNSEASVERLQPLLPPIRTGPYLCELLEEVAEGVASPDEDEDEEPAVFPCIECSIYFKQKEHLLEHMSQHRRAPGQEPPADLAPLACGECGWAFADPTALEQHRQLHQASREKIIEEIQKLKQVPGDEGREARLQCPKCVFGTNSSRAYVQHAKLHMREPPGQTTKEPFGGSSGAGSPSPEASALLYQPYGAAVGLSACVFCGFPAPSESLLREHVRLVHAHPHWEEDGEAYEEDPASQPGTSQDAHACFPDTAVDYFGKAEPSLAPMWRENPAGYDPSLAFGPGCQQLSIRDFPLSKPLLHGTGQRPLGRLAFPSTLASTPYSLQLGRNKSTVHPQGLGERRRPWSEEEEEEEEEEDVVLTSEMDFSPENGVFSPLATPSLIPQAALELKQAFREALQAVEATQGQQQQLRGMVPIVLVAKLGPQVMAAARVPPRLQPEELGLAGAHPLDFLLLDAPLGGPLGLDTLLDGDPAMALKHEERKCPYCPDRFHNGIGLANHVRGHLNRVGVSYNVRHFISAEEVKAIERRFSFQKKKKKVANFDPGTFSLMRCDFCGAGFDTRAGLSSHARAHLRDFGITNWELTVSPINILQELLATSAAEQPPSPLGREPGGPPGSFLTSRRPRLPLTVPFPPTWAEDPGPAYGDAQSLTTCEVCGACFETRKGLSSHARSHLRQLGVAESESSGAPIDLLYELVKQKGLPDAHLGLPPGLAKKSSSLKEVVAGAPRPGLLSLAKPLDAPAVNKAIKSPPGFSAKGLGHPPSSPLLKKTPLALAGSPTPKNPEDKSPQLSLSPRPASPKAQWPQSEDEGPLNLTSGPEPARDIRCEFCGEFFENRKGLSSHARSHLRQMGVTEWYVNGSPIDTLREILKRRTQSRPGGPPNPPGPSPKALAKMMGGAGPGSSLEARSPSDLHISPLAKKLPPPPGSPLGHSPTASPPPTARKMFPGLAAPSLPKKLKPEQIRVEIKREMLPGALHGELHPSEGPWGAPREDMTPLNLSSRAEPVRDIRCEFCGEFFENRKGLSSHARSHLRQMGVTEWSVNGSPIDTLREILKKKSKPCLIKKEPPAGDLAPALAEDGPPTVAPGPVQSPLPLSPLAGRPGKPGAGPAQVPRELSLTPITGAKPSATGYLGSVAAKRPLQEDRLLPAEVKAKTYIQTELPFKAKTLHEKTSHSSTEACCELCGLYFENRKALASHARAHLRQFGVTEWCVNGSPIETLSEWIKHRPQKVGAYRSYIQGGRPFTKKFRSAGHGRDSDKRPSLGLAPGGLAVVGRSAGGEPGPEAGRAADGGERPLAASPPGTVKAEEHQRQNINKFERRQARPPDASAARGGEDTNDLQQKLEEVRQPPPRVRPVPSLVPRPPQTSLVKFVGNIYTLKCRFCEVEFQGPLSIQEEWVRHLQRHILEMNFSKADPPPEESQAPQAQTAAAEAP

SEQ ID NO: 15839 - protein, 449 aa, Homo Sapiens
MGSDVRDLNALLPAVPSLGGGGGCALPVSGAAQWAPVLDFAPPGASAYGSLGGPAPPPAPPPPPPPPPHSFIKQEPSWGGAEPHEEQCLSAFTVHFSGQFTGTAGACRYGPFGPPPPSQASSGQARMFPNAPYLPSCLESQPAIRNQGYSTVTFDGTPSYGHTPSHHAAQFPNHSFKHEDPMGQQGSLGEQQYSVPPPVYGCHTPTDSCTGSQALLLRTPYSSDNLYQMTSQLECMTWNQMNLGATLKGVAAGSSSSVKWTEGQSNHSTGYESDNHTTPILCGAQYRIHTHGVFRGIQDVRRVPGVAPTLVRSASETSEKRPFMCAYPGCNKRYFKLSHLQMHSRKHTGEKPYQCDFKDCERRFSRSDQLKRHQRRHTGVKPFQCKTCQRKFSRSDHLKTHTRTHTGKTSEKPFSCRWPSCQKKFARSDELVRHHNMHQRNMTKLQLAL

SEQ ID NO: 15840 - protein, 261 aa, Homo Sapiens
MVVVAAAPNPADGTPKVLLLSGQPASAAGAPAGQALPLMVPAQRGASPEAASGGLPQARKRQRLTHLSPEEKALRRKLKNRVAAQTARDRKKARMSELEQQVVDLEEENQKLLLENQLLREKTHGLVVENQELRQRLGMDALVAEEEAEAKGNEVRPVAGSAESAALRLRAPLQQVQAQLSPLQNISPWILAVLTLQIQSLISCWAFWTTWTQSCSSNALPQSLPAWRSSQRSTQKDPVPYQPPFLCQWGRHQPSWKPLMN

SEQ ID NO: 15841 - protein, 324 aa, Homo Sapiens
MSSEAETQQPPAAPPAAPALSAADTKPGTTGSGAGSGGPGGLTSAAPAGGDKKVIATKVLGTVKWFNVRNGYGFINRNDTKEDVFVHQTAIKKNNPRKYLRSVGDGETVEFDVVEGEKGAEAANVTGPGGVPVQGSKYAADRNHYRRYPRRRGPPRNYQQNYQNSESGEKNEGSESAPEGQAQQRRPYRRRRFPPYYMRRPYGRRPQYSNPPVQGEVMEGADNQGAGEQGRPVRQNMYRGYRPRFRRGPPRQRQPREDGNEEDKENQGDETQGQQPPQRRYRRNFNYRRRRPENPKPQDGKETKAADPPAENSSAPEAEQGGAE

SEQ ID NO: 15842 - protein, 364 aa, Homo Sapiens
MSEVEAAAGATAVPAATVPATAAGVVAVVVPVPAGEPQKGGGAGGGGGAASGPAAGTPSAPGSRTPGNPATAVSGTPAPPARSQADKPVLAIQVLGTVKWFNVRNGYGFINRNDTKEDVFVHQTAIKRNNPRKFLRSVGDGETVEFDVVEGEKGAEATNVTGPGGVPVKGSRYAPNRRKSRRFIPRPPSVAPPPMVAEIPSAGTGPGSKGERAEDSGQRPRRWCPPPFFYRRRFVRGPRPPNQQQPIEGTDRVEPKETAPLEGHQQQGDERVPPPRFRPRYRRPFRPRPRQQPTTEGGDGETKPSQGPADGSRPEPQRPRNRPYFQRRRQQAPGPQQAPGPRQPAAPETSAPVNSGDPTTTILE

SEQ ID NO: 15843 - protein, 372 aa, Homo Sapiens
MSEAGEATTTTTTTLPQAPTEAAAAAPQDPAPKSPVGSGAPQAAAPAPAAHVAGNPGGDAAPAATGTAAAASLATAAGSEDAEKKVLATKVLGTVKWFNVRNGYGFINRNDTKEDVFVHQTAIKKNNPRKYLRSVGDGETVEFDVVEGEKGAEAANVTGPDGVPVEGSRYAADRRRYRRGYYGRRRGPPRNYAGEEEEEGSGSSEGFDPPATDRQFSGARNQLRRPQYRPQYRQRRFPPYHVGQTFDRRSRVLPHPNRIQAGEIGEMKDGVPEGAQLQGPVHRNPTYRPRYRSRGPPRPRPAPAVGEAEDKENQQATSGPNQPSVRRGYRRPYNYRRRPRPPNAPSQDGKEAKAGEAPTENPAPPTQQSSAE

SEQ ID NO: 15844 - protein, 1422 aa, Homo Sapiens
MSGIKRTIKETDPDYEDVSVALPNKRHKAIENSARDAAVQKIETIIKEQFALEMKNKEHEIEVIDQRLIEARRMMDKLRACIVANYYASAGLLKVSEGSKTCDTMVFNHPAIKKFLESPSRSSSPANQRAETPSANHSESDSLSQHNDFLSDKDNNSNMDIEERLSNNMEQRPSRNTGRDTSRITGSHKTEQRNADLTDETSRLFVKKTIVVGNVSKYIPPDKREENDQSTHKWMVYVRGSRREPSINHFVKKVWFFLHPSYKPNDLVEVREPPFHLTRRGWGEFPVRVQVHFKDSQNKRIDIIHNLKLDRTYTGLQTLGAETVVDVELHRHSLGEDCIYPQSSESDISDAPPSLPLTIPAPVKASSPIKQSHEPVPDTSVEKGFPASTEAERHTPFYALPSSLERTPTKMTTSQKVTFCSHGNSAFQPIASSCKIVPQSQVPNPESPGKSFQPITMSCKIVSGSPISTPSPSPLPRTPTSTPVHVKQGTAGSVINNPYVIMDKQPGQVIGATTPSTGSPTNKISTASQVSQGTGSPVPKIHGSSFVTSTVKQEDSLFASMPPLCPIGSHPKVQSPKPITGGLGAFTKVIIKQEPGEAPHVPATGAASQSPLPQYVTVKGGHMIAVSPQKQVITPGEGIAQSAKVQPSKVVGVPVGSALPSTVKQAVAISGGQILVAKASSSVSKAVGPKQVVTQGVAKAIVSGGGGTIVAQPVQTLTKAQVTAAGPQKSGSQGSVMATLQLPATNLANLANLPPGTKLYLTTNSKNPSGKGKLLLIPQGAILRATNNANLQSGSAASGGSGAGGGGGGGGGGGSGSGGGGSTGGGGGTAGGGTQSTAGPGGISQHLTYTSYILKQTPQGTFLVGQPSPQTSGKQLTTGSVVQGTLGVSTSSAQGQQTLKVISGQKTTLFTQAAHGGQASLMKISDSTLKTVPATSQLSKPGTTMLRVAGGVITTATSPAVALSANGPAQQSEGMAPVSSSTVSSVTKTSGQQQVCVSQATVGTCKAATPTVVSATSLVPTPNPISGKATVSGLLKIHSSQSSPQQAVLTIPSQLKPLSVNTSGGVQTILMPVNKVVQSFSTSKPPAILPVAAPTPVVPSSAPAAVAKVKTEPETPGPSCLSQEGQTAVKTEESSELGNYVIKIDHLETIQQLLTAVVKKIPLITAKSEDASCFSAKSVEQYYGWNIGKRRAAEWQRAMTMRKVLQEILEKNPRFHHLTPLKTKHIAHWCRCHGYTPPDPESLRNDGDSIEDVLTQIDSEPECPSSFSSADNLCRKLEDLQQFQKREPENEEEVDILSLSEPVKINIKKEQEEKQEEVKFYLPPTPGSEFIGDVTQKIGITLQPVALHRNVYASVVEDMILKATEQLVNDILRQALAVGYQTASHNRIPKEITVSNIHQAICNIPFLDFLTNKHMGILNEDQ

SEQ ID NO: 15845 - protein, 227 aa, Homo Sapiens
MFKRMAEFGPDSGGRVKGVTIVKPIVYGNVARYFGKKREEDGHTHQWTVYVKPYRNEDMSAYVKKIQFKLHESYGNPLRVVTKPPYEITETGWGEFEIIIKIFFIDPNERPVTLYHLLKLFQSDTNAMLGKKTVVSEFYDEMIFQDPTAMMQQLLTTSRQLTLGAYKHETEFAELEVKTREKLEAAKKKTSFEIAELKERLKASRETINCLKNEIRKLEEDDQAKDI

SEQ ID NO: 15846 - protein, 414 aa, Homo Sapiens
MASGDTLYIATDGSEMPAEIVELHEIEVETIPVETIETTVVGEEEEEDDDDEDGGGGDHGGGGGHGHAGHHHHHHHHHHHPPMIALQPLVTDDPTQVHHHQEVILVQTREEVVGGDDSDGLRAEDGFEDQILIPVPAPAGGDDDYIEQTLVTVAAAGKSGGGGSSSSGGGRVKKGGGKKSGKKSYLSGGAGAAGGGGADPGNKKWEQKQVQIKTLEGEFSVTMWSSDEKKDIDHETVVEEQIIGENSPPDYSEYMTGKKLPPGGIPGIDLSDPKQLAEFARMKPRKIKEDDAPRTIACPHKGCTKMFRDNSAMRKHLHTHGPRVHVCAECGKAFVESSKLKRHQLVHTGEKPFQCTFEGCGKRFSLDFNLRTHVRIHTGDRPYVCPFDGCNKKFAQSTNLKSHILTHAKAKNNQ

SEQ ID NO: 15847 - protein, 372 aa, Homo Sapiens
MASNEDFSITQDLEIPADIVELHDINVEPLPMEDIPTESVQYEDVDGNWIYGGHNHPPLMVLQPLFTNTGYGDHDQEMLMLQTQEEVVGYCDSDNQLGNDLEDQLALPDSIEDEHFQMTLASLSASAASTSTSTQSRSKKPSKKPSGKSATSTEANPAGSSSSLGTRKWEQKQMQVKTLEGEFSVTMWSPNDNNDQGAVGEGQAENPPDYSEYLKGKKLPPGGLPGIDLSDPKQLAEFTKVKPKRSKGEPPKTVPCSYSGCEKMFRDYAAMRKHLHIHGPRVHVCAECGKAFLESSKLRRHQLVHTGEKPFQCTFEGCGKRFSLDFNLRTHLRIHTGDKPFVCPFDVCNRKFAQSTNLKTHILTHVKTKNNP

SEQ ID NO: 15848 - protein, 694 aa, Homo Sapiens
MENKSLESSQTDLKLVAHPRAKSKVWKYFGFDTNAEGCILQWKKIYCRICMAQIAYSGNTSNLSYHLEKNHPEEFCEFVKSNTEQMREAFATAFSKLKPESSQQPGQDALAVKAGHGYDSKKQQELTAAVLGLICEGLYPASIVDEPTFKVLLKTADPRYELPSRKYISTKAIPEKYGAVREVILKELAEATWCGISTDMWRSENQNRAYVTLAAHFLGLGAPNCLSMGSRCLKTFEVPEENTAETITRVLYEVFIEWGISAKVFGATTNYGKDIVKACSLLDVAVHMPCLGHTFNAGIQQAFQLPKLGALLSRCRKLVEYFQQSAVAMYMLYEKQKQQNVAHCMLVSNRVSWWGSTLAMLQRLKEQQFVIAGVLVEDSNNHHLMLEASEWATIEGLVELLQPFKQVAEMLSASRYPTISMVKPLLHMLLNTTLNIKETDSKELSMAKEVIAKELSKTYQETPEIDMFLNVATFLDPRYKRLPFLSAFERQQVENRVVEEAKGLLDKVKDGGYRPAEDKIFPVPEEPPVKKLMRTSTPPPASVINNMLAEIFCQTGGVEDQEEWHAQVVEELSNFKSQKVLGLNEDPLKWWSDRLALFPLLPKVLQKYWCVTATRVAPERLFGSAANVVSAKRNRLAPAHVDEQVFLYENARSGAEAEPEDQDEGEWGLDQEQVFSLGDGVSGGFFGIRDSSFL

SEQ ID NO: 15849 - protein, 218 aa, Homo Sapiens
MMRREDEEEEGTMMKAKGDLEMKEEEEISETGELVGPFVSAMPTPMPHNKGTRFSEAWEYFHLAPARAGHHPNQYATCRLCGRQVSRGPGVNVGTTALWKHLKSMHREELEKSGHGQAGQRQDPRPHGPQLPTGIEGNWGRLLEQVGTMALWASQREKEVLRRERAVEWRERAVEKRERALEEVERAILEMKWKVRAEKEACQREKELPAAVHPFHFV

SEQ ID NO: 15850 - protein, 234 aa, Homo Sapiens
MRSGEPACTMDQARGLDDAAARGGQCPGLGPAPTPTPPGRLGAPYSEAWGYFHLAPGRPGHPSGHWATCRLCGEQVGRGPGFHAGTSALWRHLRSAHRRELESSGAGSSPPAAPCPPPPGPAAAPEGDWARLLEQMGALAVRGSRRERELERRELAVEQGERALERRRRALQEEERAAAQARRELQAEREALQARLRDVSRREGALGWAPAAPPPLKDDPEGDRDGCVITKVLL

SEQ ID NO: 15851 - protein, 1171 aa, Homo Sapiens
MENNLKTCPKEDGDFVSDKIKFKIEEEDDDGIPPDSLERMDFKSEQEDMKQTDSGGERAGLGGTGCSCKPPGKYLSAESEDDYGALFSQYSSTLYDVAMEAVTQSLLSSRNMSSRKKSPAWKHFFISPRDSTKAICMYCVKEFSRGKNEKDLSTSCLMRHVRRAHPTVLIQENGSVSAVSSFPSPSLLLPPQPADAGDLSTILSPIKLVQKVASKIPSPDRITEESVSVVSSEEISSDMSVSEKCGREEALVGSSPHLPALHYDEPAENLAEKSLPLPKSTSGSRRRSAVWKHFYLSPLDNSKAVCIHCMNEFSRGKNGKDLGTSCLIRHMWRAHRAIVLQENGGTGIPPLYSTPPTLLPSLLPPEGELSSVSSSPVKPVRESPSASSSPDRLTEDLQSHLNPGDGLMEDVAAFSSSDDIGEASASSPEKQQADGLSPRLFESGAIFQQNKKVMKRLKSEVWHHFSLAPMDSLKAECRYCGCAISRGKKGDVGTSCLMRHLYRRHPEVVGSQKGFLGASLANSPYATLASAESSSSKLTDLPTVVTKNNQVMFPVNSKKTSKLWNHFSICSADSTKVVCLHCGRTISRGKKPTNLGTSCLLRHLQRFHSNVLKTEVSETARPSSPDTRVPRGTELSGASSFDDTNEKFYDSHPVAKKITSLIAEMIALDLQPYSFVDNVGFNRLLEYLKPQYSLPAPSYFSRTAIPGMYDNVKQIIMSHLKEAESGVIHFTSGIWMSNQTREYLTLTAHWVSFESPARPRCDDHHCSALLDVSQVDCDYSGNSIQKQLECWWEAWVTSTGLQVGITVTDNASIGKTLNEGEHSSVQCFSHTVNLIVSEAIKSQRMVQNLLSLARKICERVHRSPKAKEKLAELQREYALPQHHLIQDVPSKWSTSFHMLERLIEQKRAINEMSVECNFRELISCDQWEVMQSVCRALKPFEAASREMSTQMSTLSQVIPMVHILNRKVEMLFEETMGIDTMLRSLKEAMVSRLSATLHDPRYVFATLLDPRYKASLFTEEEAEQYKQDLIRELELMNSTSEDVAASHRCDAGSPSKDSAAEENLWSLVAKVKKKDPREKLPEAMVLAYLEEEVLEHSCDPLTYWNLKKASWPGLSALAVRFLGCPPSIVPSEKLFNTPTENGSLGQSRLMMEHFEKLIFLKVNLPLIYFQY

SEQ ID NO: 15852 - protein, 693 aa, Homo Sapiens
MIAPLLCILSYNFNTFAILNVYSKLTMFCTTNSLPMDLLLKQGSLKQEVESFCYQIVSESNDQKVGILQSEDKQLQPSVSKKSEGELSRVKFISNSNKITFSKKPKRRKYDESYLSFGFTYFGNRDAPHAQCVLCKKILSNSSLAPSKLRRHLETKHAAYKDKDISFFKQHLDSPENNKPPTPKIVNTDNESATEASYNVSYHIALSGEAHTIGELLIKPCAKDVVMRMFDEQYSKKIDAVQLSNSTVARRIKDLAADIEEELVCRLKICDGFSLQLDESADVSGLAVLLVFVRYRFNKSIEEDLLLCESLQSNATGEEIFNCINSFMQKHEIEWEKCVDVCSDASRAVDGKIAEAVTLIKYVAPESTSSHCLLYRHALAVKIMPTSLKNVLDQAVQIINYIKARPHQSRLLKILCEEMGAQHTALLLNTEVRWLSRGKVLVRLFELRRELLVFMDSAFRLSDCLTNSSWLLRLAYLADIFTKLNEVNLSMQGKNVTVFTVFDKMSSLLRKLEFWASSVEEENFDCFPTLSDFLTEINSTVDKDICSAIVQHLRGLRATLLKYFPVTNDNNAWVRNPFTVTVKPASLVARDYESLIDLTSDSQVKQNFSELSLNDFWSSLIQEYPSIARRAVRVLLPFATMHLCETGFSYYAATKTKYRKRLDAAPHMRIRLSNITPNIKRICDKKTQKHCSH

SEQ ID NO: 15853 - protein, 979 aa, Homo Sapiens
MSVCTLSVPVSSLSPGRRCNTFSDSGILGCVPINSNTDEEDVVEEKMVAEGVNKEAKQPAKKKRKKGLRIKGKRRRKKLILAKKFSKDLGSGRPVADAPALLASNDPEQDEESLFESNIEKQIYLPSTRAKTSIVWHFFHVDPQYTWRAICNLCEKSVSRGKPGSHLGTSTLQRHLQARHSPHWTRANKFGVASGEEDFTLDVSLSPSSGSNGSFEYIPTDPLDDNRMGKKHDKSASDALRAERGRFLIKSNIVKHALIPGTRAKTSAVWNFFYTDPQHISRAVCNICKRSVSRGRPGSHLGTSTLQRHLQATHPIHWAVANKDSGAVANGLDEAETERSDLLSDTLHGEKSTGSQDLTAEDLSDSDSDEPMLEVENRSESPIPVAEQGTLMRAQERETTCCGNPVSSHISQAIIQMIVEDMHPYNYFSTPAFQRFMQIVAPDYRLPSETYFFTKAVPQLYDCVREKIFLTLENVQSQKIHLTVDIWTHDPSTDYFIVTVHWVSLETASFLNNGRIPDFRKWAVLCVTGLAKDCLITNILQELNDQIGLWLSPNFLIPSFIVSDNSSNVVHAIKDGGFTHVPCFLHCLNMVIQDFFCEHKSIENMLVAARKTCHHFSHSVKARQILQEFQNDHQLPWKNLKQDETGHWISTFYMLKWLLEHCYSVHHSLGRASGVVLTSLQWTLMTYVCDILKPFEEATQKVSVKTAGLNQVLPLIHHLLLSLQKLREDFQVRGITQALNLVDSLSLKLETDTLLSAMLKSKPCILATLLDPCFKNSLEDFFPQGADLETYKQFLAEEVCNYMESSPEICQIPTSEASCPSVTVGADSFTSSLKEGTSSSGSVDSSAVDNVALGSKSFMFPSAVAVVDEYFKEKYSEFSGGDDPLIYWQRKISIWPALTQVAIQYLSCPMCSWQSECIFTKNSHFHPKQIMSLDFDNIEQLMFLKMNLKNVNYDYSTLVLSWDPEQNEVVQSSEKEILP

SEQ ID NO: 15854 - protein, 429 aa, Homo Sapiens
MAQAPADPGREGHLEQRILQVLTEAGSPVKLAQLVKECQAPKRELNQVLYRMKKELKVSLTSPATWCLGGTDPEGEGPAELALSSPAERPQQHAATIPETPGPQFSQQREEDIYRFLKDNGPQRALVIAQALGMRTAKDVNRDLYRMKSRHLLDMDEQSKAWTIYRPEDSGRRAKSASIIYQHNPINMICQNGPNSWISIANSEAIQIGHGNIITRQTVSREDGSAGPRHLPSMAPGDSSTWGTLVDPWGPQDIHMEQSILRRVQLGHSNEMRLHGVPSEGPAHIPPGSPPVSATAAGPEASFEARIPSPGTHPEGEAAQRIHMKSCFLEDATIGNSNKMSISPGVAGPGGVAGSGEGEPGEDAGRRPADTQSRSHFPRDIGQPITPSHSKLTPKLETMTLGNRSHKAAEGSHYVDEASHEGSWWGGGI

SEQ ID NO: 15855 - protein, 577 aa, Homo Sapiens
MNKLYIGNLNESVTPADLEKVFAEHKISYSGQFLVKSGYAFVDCPDEHWAMKAIETFSGKVELQGKRLEIEHSVPKKQRSRKIQIRNIPPQLRWEVLDSLLAQYGTVENCEQVNTESETAVVNVTYSNREQTRQAIMKLNGHQLENHALKVSYIPDEQIAQGPENGRRGGFGSRGQPRQGSPVAAGAPAKQQQVDIPLRLLVPTQYVGAIIGKEGATIRNITKQTQSKIDVHRKENAGAAEKAISVHSTPEGCSSACKMILEIMHKEAKDTKTADEVPLKILAHNNFVGRLIGKEGRNLKKVEQDTETKITISSLQDLTLYNPERTITVKGAIENCCRAEQEIMKKVREAYENDVAAMSLQSHLIPGLNLAAVGLFPASSSAVPPPPSSVTGAAPYSSFMQAPEQEMVQVFIPAQAVGAIIGKKGQHIKQLSRFASASIKIAPPETPDSKVRMVIITGPPEAQFKAQGRIYGKLKEENFFGPKEEVKLETHIRVPASAAGRVIGKGGKTVNELQNLTAAEVVVPRDQTPDENDQVIVKIIGHFYASQMAQRKIRDILAQVKQQHQKGQSNQAQARRK

SEQ ID NO: 15856 - protein, 713 aa, Homo Sapiens
MAKPSHSSYVLQQLNNQREWGFLCDCCIAIDDIYFQAHKAVLAACSSYFRMFFMNHQHSTAQLNLSNMKISAECFDLILQFMYLGKIMTAPSSFEQFKVAMNYLQLYNVPDCLEDIQDADCSSSKCSSSASSKQNSKMIFGVRMYEDTVARNGNEANRWCAEPSSTVNTPHNREADEESLQLGNFPEPLFDVCKKSSVSKLSTPKERVSRRFGRSFTCDSCGFGFSCEKLLDEHVLTCTNRHLYQNTRSYHRIVDIRDGKDSNIKAEFGEKDSSKTFSAQTDKYRGDTSQAADDSASTTGSRKSSTVESEIASEEKSRAAERKRIIIKMEPEDIPTDELKDFNIIKVTDKDCNESTDNDELEDEPEEPFYRYYVEEDVSIKKSGRKTLKPRMSVSADERGGLENMRPPNNSSPVQEDAENASCELCGLTITEEDLSSHYLAKHIENICACGKCGQILVKGRQLQEHAQRCGEPQDLTMNGLGNTEEKMDLEENPDEQSEIRDMFVEMLDDFRDNHYQINSIQKKQLFKHSACPFRCPNCGQRFETENLVVEHMSSCLDQDMFKSAIMEENERDHRRKHFCNLCGKGFYQRCHLREHYTVHTKEKQFVCQTCGKQFLRERQLRLHNDMHKGMARYVCSICDQGNFRKHDHVRHMISHLSAGETICQVCFQIFPNNEQLEQHMDVHLYTCGICGAKFNLRKDMRSHYNAKHLKRT

SEQ ID NO: 15857 - protein, 871 aa, Homo Sapiens
MSFSEMNRRTLAFRGGGLVTASGGGSTNNNAGGEASAWPPQPQPRQPPPPAPPALQPPNGRGADEEVELEGLEPQDLEASAGPAAGAAEEAKELLLPQDAGGPTSLGGGAGGPLLAERNRRTLAFRGGGGGGLGNNGSSRGRPETSVWPLRHFNGRGPATVDLELDALEGKELMQDGASLSDSTEDEEEGASLGDGSGAEGGSCSSSRRSGGDGGDEVEGSGVGAGEGETVQHFPLARPKSLMQKLQCSFQTSWLKDFPWLRYSKDTGLMSCGWCQKTPADGGSVDLPPVGHDELSRGTRNYKKTLLLRHHVSTEHKLHEANAQESEIPSEEGYCDFNSRPNENSYCYQLLRQLNEQRKKGILCDVSIVVSGKIFKAHKNILVAGSRFFKTLYCFSNKESPNQNNTTHLDIAAVQGFSVILDFLYSGNLVLTSQNAIEVMTVASYLQMSEVVQTCRNFIKDALNISIKSEAPESVVVDYNNRKPVNRDGLSSSRDQKIASFWATRNLTNLASNVKIENDGCNVDEGQIENYQMNDSSWVQDGSPEMAENESEGQTKVFIWNNMGSQGIQETGKTRRKNQTTKRFIYNIPPNNETNLEDCSVMQPPVAYPEENTLLIKEEPDLDGALLSGPDGDRNVNANLLAEAGTSQDGGDAGTSHDFKYGLMPGPSNDFKYGLIPGTSNDFKYGLIPGASNDFKYGLLPESWPKQETWENGESSLIMNKLKCPHCSYVAKYRRTLKRHLLIHTGVRSFSCDICGKLFTRREHVKRHSLVHKKDKKYKCMVCKKIFMLAASVGIRHGSRRYGVCVDCADKSQPGGQEGVDQGQDTEFPRDEEYEENEVGEADEELVDDGEDQNDPSRWDESGEVCMSLDD

SEQ ID NO: 15858 - protein, 1053 aa, Homo Sapiens
MSSEESYRAILRYLTNEREPYAPGTEGNVKRKIRKAAACYVVRGGTLYYQRRQRHRKTFAELEVVLQPERRRDLIEAAHLGPGGTHHTRHQTWHYLSKTYWWRGILKQVKDYIKQCSKCQEKLDRSRPISDVSEMLEELGLDLESGEESNESEDDLSNFTSSPTTASKPAKKKPVSKHELVFVDTKGVVKRSSPKHCQAVLKQLNEQRLSNQFCDVTLLIEGEEYKAHKSVLSANSEYFRDLFIEKGAVSSHEAVVDLSGFCKASFLPLLEFAYTSVLSFDFCSMADVAILARHLFMSEVLEICESVHKLMEEKQLTVYKKGEVQTVASTQDLRVQNGGTAPPVASSEGTTTSLPTELGDCEIVLLVNGELPEAEQNGEVGRQPEPQVSSEAESALSSVGCIADSHPEMESVDLITKNNQTELETSNNRENNTVSNIHPKLSKENVISSSPEDSGMGNDISAEDICAEDIPKHRQKVDQPLKDQENLVASTAKTDFGPDDDTYRSRLRQRSVNEGAYIRLHKGMEKKLQKRKAVPKSAVQQVAQKLVQRGKKMKQPKRDAKENTEEASHKCGECGMVFQRRYALIMHKLKHERARDYKCPLCKKQFQYSASLRAHLIRHTRKDAPSSSSSNSTSNEASGTSSEKGRTKREFICSICGRTLPKLYSLRIHMLKHTGVKPHACQVCGKTFIYKHGLKLHQSLHQSQKQFQCELCVKSFVTKRSLQEHMSIHTGESKYLCSVCGKSFHRGSGLSKHFKKHQPKPEVRGYHCTQCEKSFFEARDLRQHMNKHLGVKPFQCQFCDKCYSWKKDWYSHVKSHSVTEPYRCNICGKEFYEKALFRRHVKKATHGKKGRAKQNLERVCEKCGRKFTQLREYRRHMNNHEGVKPFECLTCGVAWADARSLKRHVRTHTGERPYVCPVCSEAYIDARTLRKHMTKFHRDYVPCKIMLEKDTLQFHNQGTQVAHAVSILTAGMQEQESSGPQELETVVVTGETMEALEAVAATEEYPSVSTLSDQSIMQVVNYVLAQQQGQKLSEVAEAIQTVKVEVAHISGGE

SEQ ID NO: 15859 - protein, 459 aa, Homo Sapiens
MASGVEVLRFQLPGHEAATLRNMNQLRAEERFCDVTIVADSLKFRGHKVILAACSPFLRDQFLLNPSSELQVSLMHSARIVADLLLSCYTGALEFAVRDIVNYLTAASYLQMEHVVEKCRNALSQFIEPKIGLKEDGVSEASLVSSISATKSLLPPARTPKPAPKPPPPPPLPPPLLRPVKLEFPLDEDLELKAEEEDEDEDEDVSDICIVKVESALEVAHRLKPPGGLGGGLGIGGSVGGHLGELAQSSVPPSTVAPPQGVVKACYSLSEDAEGEGLLLIPGGRASVGATSGLVEAAAVAMAARGAGGSLGAGGSRGPLPGGFSGGNPLKNIKCTKCPEVFQGVEKLVFHMRAQHFIFMCPRCGKQFNHSSNLNRHMNVHRGVKSHSCGICGKCFTQKSTLHDHLNLHSGARPYRCSYCDVRFAHKPAIRRHLKEQHGKTTAENVLEASVAEINVLIR

SEQ ID NO: 15860 - protein, 449 aa, Homo Sapiens
MEFFISMSETIKYNDDDHKTLFLKTLNEQRLEGEFCDIAIVVEDVKFRAHRCVLAACSTYFKKLFKKLEVDSSSVIEIDFLRSDIFEEVLNYMYTAKISVKKEDVNLMMSSGQILGIRFLDKLCSQKRDVSSPDENNGQSKSKYCLKINRPIGDAADTQDDDVEEIGDQDDSPSDDTVEGTPPSQEDGKSPTTTLRVQEAILKELGSEEVRKVNCYGQEVESMETPESKDLGSQTPQALTFNDGMSEVKDEQTPGWTTAASDMKFEYLLYGHHREQIACQACGKTFSDEGRLRKHEKLHTADRPFVCEMCTKGFTTQAHLKEHLKIHTGYKPYSCEVCGKSFIRAPDLKKHERVHSNERPFACHMCDKAFKHKSHLKDHERRHRGEKPFVCGSCTKAFAKASDLKRHENNMHSERKQVTPSAIQSETEQLQAAAMAAEAEQQLETIACS

SEQ ID NO: 15861 - protein, 673 aa, Homo Sapiens; identical to SEQ ID NO: 15499

SEQ ID NO: 15862 - protein, 803 aa, Homo Sapiens
MDFPQHSQHVLEQLNQQRQLGLLCDCTFVVDGVHFKAHKAVLAACSEYFKMLFVDQKDVVHLDISNAAGLGQVLEFMYTAKLSLSPENVDDVLAVATFLQMQDIITACHALKSLAEPATSPGGNAEALATEGGDKRAKEEKVATSTLSRLEQAGRSTPIGPSRDLKEERGGQAQSAASGAEQTEKADAPREPPPVELKPDPTSGMAAAEAEAALSESSEQEMEVEPARKGEEEQKEQEEQEEEGAGPAEVKEEGSQLENGEAPEENENEESAGTDSGQELGSEARGLRSGTYGDRTESKAYGSVIHKCEDCGKEFTHTGNFKRHIRIHTGEKPFSCRECSKAFSDPAACKAHEKTHSPLKPYGCEECGKSYRLISLLNLHKKRHSGEARYRCEDCGKLFTTSGNLKRHQLVHSGEKPYQCDYCGRSFSDPTSKMRHLETHDTDKEHKCPHCDKKFNQVGNLKAHLKIHIADGPLKCRECGKQFTTSGNLKRHLRIHSGEKPYVCIHCQRQFADPGALQRHVRIHTGEKPCQCVMCGKAFTQASSLIAHVRQHTGEKPYVCERCGKRFVQSSQLANHIRHHDNIRPHKCSVCSKAFVNVGDLSKHIIIHTGEKPYLCDKCGRGFNRVDNLRSHVKTVHQGKAGIKILEPEEGSEVSVVTVDDMVTLATEALAATAVTQLTVVPVGAAVTADETEVLKAEISKAVKQVQEEDPNTHILYACDSCGDKFLDANSLAQHVRIHTAQALVMFQTDADFYQQYGPGGTWPAGQVLQAGELVFRPRDGAEGQPALAETSPTAPECPPPAE

SEQ ID NO: 15863 - protein, 522 aa, Homo Sapiens
MEFPDHSRHLLQCLSEQRHQGFLCDCTVLVGDAQFRAHRAVLASCSMYFHLFYKDQLDKRDIVHLNSDIVTAPAFALLLEFMYEGKLQFKDLPIEDVLAAASYLHMYDIVKVCKKKLKEKATTEADSTKKEEDASSCSDKVESLSDGSSHIAGDLPSDEDEGEDEKLNILPSKRDLAAEPGNMWMRLPSDSAGIPQAGGEAEPHATAAGKTVASPCSSTESLSQRSVTSVRDSADVDCVLDLSVKSSLSGVENLNSSYFSSQDVLRSNLVQVKVEKEASCDESDVGTNDYDMEHSTVKESVSTNNRVQYEPAHLAPLREDSVLRELDREDKASDDEMMTPESERVQVEGGMESSLLPYVSNILSPAGQIFMCPLCNKVFPSPHILQIHLSTHFREQDGIRSKPAADVNVPTCSLCGKTFSCMYTLKRHERTHSGEKPYTCTQCGKSFQYSHNLSRHAVVHTREKPHACKWCERRFTQSGDLYRHIRKFHCELVNSLSVKSEALSLPTVRDWTLEDSSQELWK

SEQ ID NO: 15864 - protein, 514 aa, Homo Sapiens
MDLANHGLILLQQLNAQREFGFLCDCTVAIGDVYFKAHKSVLASFSNYFKMLFVHQTSECVRLKPTDIQPDIFSYLLHLMYTGKMAPQLIDPVRLEQGIKFLHAYPLIQEASLASQGAFSHPDQVFPLASSLYGIQIADHQLRQATKIASAPEKLGRDPRPQTSRISQEQVPEASQLSQLTSNLAQVNRTNMTPSDPLQTSLSPELVSTPVPPPPPGEETNLEASSSDEQPASLTIAHVKPSIMKRNGSFPKYYACHLCGRRFTLRSSLREHLQIHTGVPFTSSQQGESRVPLTLCSNAADLGKDAMEVPEAGMISDSELQHISDSPIIDGQQQSETPPPSDIADIDNLEQADQEREVKRRKYECTICGRKFIQKSHWREHMYIHTGKPFKCSTCDKSFCRANQAARHVCLNQSIDTYTMVDKQTLELCTFEEGSQMDNMLVQTNKPYKCNLCDKTFSTPNEVVKHSCQNQNSDVFALDEGRSILLGSGDSEVTEPDHPVLASIKKEQETVLLD

SEQ ID NO: 15865 - protein, 741 aa, Homo Sapiens
MLERKKPKTAENQKASEENEITQPGGSSAKPGLPCLNFEAVLSPDPALIHSTHSLTNSHAHTGSSDCDISCKGMTERIHSINLHNFSNSVLETLNEQRNRGHFCDVTVRIHGSMLRAHRCVLAAGSPFFQDKLLLGYSDIEIPSVVSVQSVQKLIDFMYSGVLRVSQSEALQILTAASILQIKTVIDECTRIVSQNVGDVFPGIQDSGQDTPRGTPESGTSGQSSDTESGYLQSHPQHSVDRIYSALYACSMQNGSGERSFYSGAVVSHHETALGLPRDHHMEDPSWITRIHERSQQMERYLSTTPETTHCRKQPRPVRIQTLVGNIHIKQEMEDDYDYYGQQRVQILERNESEECTEDTDQAEGTESEPKGESFDSGVSSSIGTEPDSVEQQFGPGAARDSQAEPTQPEQAAEAPAEGGPQTNQLETGASSPERSNEVEMDSTVITVSNSSDKSVLQQPSVNTSIGQPLPSTQLYLRQTETLTSNLRMPLTLTSNTQVIGTAGNTYLPALFTTQPAGSGPKPFLFSLPQPLAGQQTQFVTVSQPGLSTFTAQLPAPQPLASSAGHSTASGQGEKKPYECTLCNKTFTAKQNYVKHMFVHTGEKPHQCSICWRSFSLKDYLIKHMVTHTGVRAYQCSICNKRFTQKSSLNVHMRLHRGEKSYECYICKKKFSHKTLLERHVALHSASNGTPPAGTPPGARAGPPGVVACTEGTTYVCSVCPAKFDQIEQFNDHMRMHVSDG

SEQ ID NO: 15866 - protein, 1066 aa, Homo Sapiens
MEGLLHYINPAHAISLLSALNEERLKGQLCDVLLIVGDQKFRAHKNVLAASSEYFQSLFTNKENESQTVFQLDFCEPDAFDNVLNYIYSSSLFVEKSSLAAVQELGYSLGISFLTNIVSKTPQAPFPTCPNRKKVFVEDDENSSQKRSVIVCQSRNEAQGKTVSQNQPDVSHTSRPSPSIAVKANTNKPHVPKPIEPLHNLSLTEKSWPKDSSVVYAKSLEHSGSLDDPNRISLVKRNAVLPSKPLQDREAMDDKPGVSGQLPKGKALELALKRPRPPVLSVCSSSETPYLLKETNKGNGQGEDRNLLYYSKLGLVIPSSGSGSGNQSIDRSGPLVKSLLRRSLSMDSQVPVYSPSIDLKSSQGSSSVSSDAPGNVLCALSQKSSLKDCSEKTALDDRPQVLQPHRLRSFSASQSTDREGASPVTEVRIKTEPSSPLSDPSDIIRVTVGDAATTAAASSSSVTRDLSLKTEDDQKDMSRLPAKRRFQADRRLPFKKLKVNEHGSPVSEDNFEEGSSPTLLDADFPDSDLNKDEFGELEGTRPNKKFKCKHCLKIFRSTAGLHRHVNMYHNPEKPYACDICHKRFHTNFKVWTHCQTQHGIVKNPSPASSSHAVLDEKFQRKLIDIVREREIKKALIIKLRRGKPGFQGQSSSQAQQVIKRNLRSRAKGAYICTYCGKAYRFLSQFKQHIKMHPGEKPLGVNKVAKPKEHAPLASPVENKEVYQCRLCNAKLSSLLEQGSHERLCRNAAVCPYCSLRFFSPELKQEHESKCEYKKLTCLECMRTFKSSFSIWRHQVEVHNQNNMAPTENFSLPVLDHNGDVTGSSRPQSQPEPNKVNHIVTTKDDNVFSDSSEQVNFDSEDSSCLPEDLSLSKQLKIQVKEEPVEEAEEEAPEASTAPKEAGPSKEASLWPCEKCGKMFTVHKQLERHQELLCSVKPFICHVCNKAFRTNFRLWSHFQSHMSQASEESAHKESEVCPVPTNSPSPPPLPPPPPLPKIQPLEPDSPTGLSENPTPATEKLFVPQESDTLFYHAPPLSAITFKRQFMCKLCHRTFKTAFSLWSHEQTHN

SEQ ID NO: 15867 - protein, 634 aa, Homo Sapiens
MEPSPLSPSGAALPLPLSLAPPPLPLPAAAVVHVSFPEVTSALLESLNQQRLQGQLCDVSIRVQGREFRAHRAVLAASSPYFHDQVLLKGMTSISLPSVMDPGAFETVLASAYTGRLSMAAADIVNFLTVGSVLQMWHIVDKCTELLREGRASATTTITTAAATSVTVPGAGVPSGSGGTVAPATMGSARSHASSRASENQSPSSSNYFSPRESTDFSSSSQEAFAASAVGSGERRGGGPVFPAPVVGSGGATSGKLLLEADELCDDGGDGRGAVVPGAGLRRPTYTPPSIMPQKHWVYVKRGGNCPAPTPLVPQDPDLEEEEEEEDLVLTCEDDEDEELGGSSRVPVGGGPEATLSISDVRTLSEPPDKGEEQVNFCESSNDFGPYEGGGPVAGLDDSGGPTPSSYAPSHPPRPLLPLDMQGNQILVFPSSSSSSSSQAPGQPPGNQAEHGAVTVGGTSVGSLGVPGSVGGVPGGTGSGDGNKIFLCHCGKAFSHKSMRDRHVNMHLNLRPFDCPVCNKKFKMKHHLTEHMKTHTGLKPYECGVCAKKFMWRDSFMRHRGHCERRHRLGGVGAVPGPGTPTGPSLPSKRESPGVGGGSGDEASAATPPSSRRVWSPPRVHKVEMGFGGGGGAN

SEQ ID NO: 15868 - protein, 697 aa, Homo Sapiens
MAETSPEPSGQLVVHSDAHSDTVLASFEDQRKKGFLCDITLIVENVHFRAHKALLAASSEYFSMMFAEEGEIGQSIYMLEGMVADTFGILLEFIYTGYLHASEKSTEQILATAQFLKVYDLVKAYTDFQNNHSSPKPTTLNTAGAPVVVISNKKNDPPKRKRGRPKKVNTLQEEKSELAAEEEIQLRVNNSVQNRQNFVVKGDSGVLNEQIAAKEKEESEPTCEPSREEEMPVEKDENYDPKTEDGQASQSRYSKRRIWRSVKLKDYKLVGDQEDHGSAKRICGRRKRPGGPEARCKDCGKVFKYNHFLAIHQRSHTGERPFKCNECGKGFAQKHSLQVHTRMHTGERPYTCTVCSKALTTKHSLLEHMSLHSGQKSFTCDQCGKYFSQNRQLKSHYRVHTGHSLPECKDCHRKFMDVSQLKKHLRTHTGEKPFTCEICGKSFTAKSSLQTHIRIHRGEKPYSCGICGKSFSDSSAKRRHCILHTGKKPFSCPECNLQFARLDNLKAHLKIHSKEKHASDASSISGSSNTEEVRNILQLQPYQLSTSGEQEIQLLVTDSVHNINFMPGPSQGISIVTAESSQNMTADQAANLTLLTQQPEQLQNLILSAQQEQTEHIQSLNMIESQMGPSQTEPVHVITLSKETLEHLHAHQEQTEELHLATSTSDPAQHLQLTQEPGPPPPTHHVPQPTPLGQEQS

SEQ ID NO: 15869 - protein, 435 aa, Homo Sapiens
MDTASHSLVLLQQLNMQREFGFLCDCTVAIGDVYFKAHRAVLAAFSNYFKMIFIHQTSECIKIQPTDIQPDIFSYLLHIMYTGKGPKQIVDHSRLEEGIRFLHADYLSHIATEMNQVFSPETVQSSNLYGIQISTTQKTVVKQGLEVKEAPSSNSGNRAAVQGDHPQLQLSLAIGLDDGTADQQRACPATQALEEHQKPPVSIKQERCDPESVISQSHPSPSSEVTGPTFTENSVKIHLCHYCGERFDSRSNLRQHLHTHVSGSLPFGVPASILESNDLGEVHPLNENSEALECRRLSSFIVKENEQQPDHTNRGTTEPLQISQVSLISKDTEPVELNCNFSFSRKRKMSCTICGHKFPRKSQLLEHMYTHKGKSYRYNRCQRFGNALAQRFQPYCDSWSDVSLKSSRLSQEHLDLPCALESELTQENVDTILVE

SEQ ID NO: 15870 - protein, 441 aa, Homo Sapiens
MSERSDLLHFKFENYGDSMLQKMNKLREENKFCDVTVLIDDIEVQGHKIVFAAGSPFLRDQFLLNDSREVKISILQSSEVGRQLLLSCYSGVLEFPEMELVNYLTAASFLQMSHIVERCTQALWKFIKPKQPMDSKEGCEPQSASPQSKEQQGDARGSPKQDSPCIHPSEDSMDMEDSDIQIVKVESIGDVSEVRSKKDQNQFISSEPTALHSSEPQHSLINSTVENRVSEIEQNHLHNYALSYTGSDNIIMASKDVFGPNIRGVDKGLQWHHQCPKCTRVFRHLENYANHLKMHKLFMCLLCGKTFTQKGNLHRHMRVHAGIKPFQCKICGKTFSQKCSLQDHLNLHSGDKPHKCNYCDMVFAHKPVLRKHLKQLHGKNSFDNANERNVQDLTVDFDSFACTTVTDSKGCQPQPDATQVLDAGKLAQAVLNLRNDSTCVN

SEQ ID NO: 15871 - protein, 574 aa, Homo Sapiens
MLREFSKWGVEASPGKAWERKRSLLRGAVGRYRGATGGDLFWAPFPSWGTMEFPEHSQQLLQSLREQRSQGFLCDCTVMVGSTQFLAHRAVLASCSPFFQLFYKERELDKRDLVCIHNEIVTAPAFGLLLDFMYAGQLTLRGDTPVEDVLAAASYLHMNDIVKVCKRRLQARALAEADSTKKEEETNSQLPSLEFLSSTSRGTQPSLASAETSGHWGKGEWKGSAAPSPTVRPPDEPPMSSGADTTQPGMEVDAPHLRAPHPPVADVSLASPSSSTETIPTNYFSSGISAVSLEPLPSLDVGPESLRVVEPKDPGGPLQGFYPPASAPTSAPAPVSAPVPSQAPAPAEAELVQVKVEAIVISDEETDVSDEQPQGPERAFPSGGAVYGAQPSQPEAFEDPGAAGLEEVGPSDHFLPTDPHLPYHLLPGAGQYHRGLVTSPLPAPASLHEPLYLSSEYEAAPGSFGVFTEDVPTCKTCGKTFSCSYTLRRHATVHTRERPYECRYCLRSYTQSGDLYRHIRKAHNEDLAKRSKPDPEVGPLLGVQPLPGSPTADRQSSSGGGPPKDFVLAPKTNI

SEQ ID NO: 15872 - protein, 487 aa, Homo Sapiens
MSLPPIRLPSPYGSDRLVQLAARLRPALCDTLITVGSQEFPAHSLVLAGVSQQLGRRGQWALGEGISPSTFAQLLNFVYGESVELQPGELRPLQEAARALGVQSLEEACWRARGDRAKKPDPGLKKHQEEPEKPSRNPERELGDPGEKQKPEQVSRTGGREQEMLHKHSPPRGRPEMAGATQEAQQEQTRSKEKRLQAPVGQRGADGKHGVLTWLRENPGGSEESLRKLPGPLPPAGSLQTSVTPRPSWAEAPWLVGGQPALWSILLMPPRYGIPFYHSTPTTGAWQEVWREQRIPLSLNAPKGLWSQNQLASSSPTPGSLPQGPAQLSPGEMEESDQGHTGALATCAGHEDKAGCPPRPHPPPAPPARSRPYACSVCGKRFSLKHQMETHYRVHTGEKPFSCSLCPQRSRDFSAMTKHLRTHGAAPYRCSLCGAGCPSLASMQAHMRGHSPSQLPPGWTIRSTFLYSSSRPSRPSTSPCCPSSSTT

SEQ ID NO: 15873 - protein, 672 aa, Homo Sapiens
MESRKLISATDIQYSGSLLNSLNEQRGHGLFCDVTVIVEDRKFRAHKNILSASSTYFHQLFSVAGQVVELSFIRAEIFAEILNYIYSSKIVRVRSDLLDELIKSGQLLGVKFIAELGVPLSQVKSISGTAQDGNTEPLPPDSGDKNLVIQKSKDEAQDNGATIMPIITESFSLSAEDYEMKKIIVTDSDDDDDDVIFCSEILPTKETLPSNNTVAQVQSNPGPVAISDVAPSASNNSPPLTNITPTQKLPTPVNQATLSQTQGSEKLLVSSAPTHLTPNIILLNQTPLSTPPNVSSSLPNHMPSSINLLVQNQQTPNSAILTGNKANEEEEEEIIDDDDDTISSSPDSAVSNTSLVPQADTSQNTSFDGSLIQKMQIPTLLQEPLSNSLKISDIITRNTNDPGVGSKHLMEGQKIITLDTATEIEGLSTGCKVYANIGEDTYDIVIPVKDDPDEGEARLENEIPKTSGSEMANKRMKVKHDDHYELIVDGRVYYICIVCKRSYVCLTSLRRHFNIHSWEKKYPCRYCEKVFPLAEYRTKHEIHHTGERRYQCLACGKSFINYQFMSSHIKSVHSQDPSGDSKLYRLHPCRSLQIRQYAYLSDRSSTIPAMKDDGIGYKVDTGKEPPVGTTTSTQNKPMTWEDIFIQQENDSIFKQNVTDGSTEFEFIIPESY

SEQ ID NO: 15874 - protein, 500 aa, Homo Sapiens
MDSSSFIQFDVPEYSSTVLSQLNELRLQGKLCDIIVHIQGQPFRAHKAVLAASSPYFRDHSALSTMSGLSISVIKNPNVFEQLLSFCYTGRMSLQLKDVVSFLTAASFLQMQCVIDKCTQILESIHSKISVGDVDSVTVGAEENPESRNGVKDSSFFANPVEISPPYCSQGRQPTASSDLRMETTPSKALRSRLQEEGHSDRGSSGSVSEYEIQIEGDHEQGDLLVRESQITEVKVKMEKSDRPSCSDSSSLGDDGYHTEMVDGEQVVAVNVGSYGSVLQHAYSYSQAASQPTNVSEAFGSLSNSSPSRSMLSCFRGGRARQKRALSVHLHSDLQGLVQGSDSEAMMNNPGYESSPRERSARGHWYPYNERLICIYCGKSFNQKGSLDRHMRLHMGITPFVCKFCGKKYTRKDQLEYHIRGHTDDKPFRCEICGKCFPFQGTLNQHLRKNHPGVAEVRSRIESPERTDVYVEQKLENDASASEMGLDSRMEIHTVSDAPD

SEQ ID NO: 15875 - protein, 503 aa, Homo Sapiens
MEKGGNIQLEIPDFSNSVLSHLNQLRMQGRLCDIVVNVQGQAFRAHKVVLAASSPYFRDHMSLNEMSTVSISVIKNPTVFEQLLSFCYTGRICLQLADIISYLTAASFLQMQHIIDKCTQILEGIHFKINVAEVEAELSQTRTKHQERPPESHRVTPNLNRSLSPRHNTPKGNRRGQVSAVLDIRELSPPEESTSPQIIEPSSDVESREPILRINRAGQWYVETGVADRGGRSDDEVRVLGAVHIKTENLEEWLGPENQPSGEDGSSAEEVTAMVIDTTGHGSVGQENYTLGSSGAKVARPTSSEVDRFSPSGSVVPLTERHRARSESPGRMDEPKQPSSQVEESAMMGVSGYVEYLREQEVSERWFRYNPRLTCIYCAKSFNQKGSLDRHMRLHMGITPFVCRMCGKKYTRKDQLEYHIRKHTGNKPFHCHVCGKSFPFQAILNQHFRKNHPGCIPLEGPHSISPETTVTSRGQAEEESPSQEETVAPGEAVQGSVSTTGPD

SEQ ID NO: 15876 - protein, 1195 aa, Homo Sapiens
MTVMSLSRDLKDDFHSDTVLSILNEQRIRGILCDVTIIVEDTKFKAHSNVLAASSLYFKNIFWSHTICISSHVLELDDLKAEVFTEILNYIYSSTVVVKRQETVTDLAAAGKKLGISFLEDLTDRNFSNSPGPYVFCITEKGVVKEEKNEKRHEEPAITNGPRITNAFSIIETENSNNMFSPLDLRASFKKVSDSMRTASLCLERTDVCHEAEPVRTLAEHSYAVSSVAEAYRSQPVREHDGSSPGNTGKENCEALAAKPKTCRKPKTFSIPQDSDSATENIPPPPVSNLEVNQERSPQPAAVLTRSKSPNNEGDVHFSREDENQSSDVPGPPAAEVPPLVYNCSCCSKAFDSSTLLSAHMQLHKPTQEPLVCKYCNKQFTTLNRLDRHEQICMRSSHMPIPGGNQRFLENYPTIGQNGGSFTGPEPLLSENRIGEFSSTGSTLPDTDHMVKFVNGQMLYSCVVCKRSYVTLSSLRRHANVHSWRRTYPCHYCNKVFALAEYRTRHEIWHTGERRYQCIFCLETFMTYYILKNHQKSFHAIDHRLSISKKTANGGLKPSVYPYKLYRLLPMKCKRAPYKSYRNSSYENARENSQMNESAPGTYVVQNPHSSELPTLNFQDTVNTLTNSPAIPLETSACQDIPTSANVQNAEGTKWGEEALKMDLDNNFYSTEVSVSSTENAVSSDLRAGDVPVLSLSNSSENAASVISYSGSAPSVIVHSSQFSSVIMHSNAIAAMTSSNHRAFSDPAVSQSLKDDSKPEPDKVGRFASRPKSIKEKKKTTSHTRGEIPEESNYVADPGGSLSKTTNIAEETSKIETYIAKPALPGTSTNSNVAPLCQITVKIGNEAIVKRHILGSKLFYKRGRRPKYQMQEEPLPQGNDPEPSGDSPLGLCQSECMEMSEVFDDASDQDSTDKPWRPYYNYKPKKKSRQLKKMRKVNWRKEHGNRSPSHKCKYPAELDCAVGKAPQDKPFEEEETKEMPKLQCELCDGDKAVGAGNQGRPHRHLTSRPYACELCAKQFQSPSTLKMHMRCHTGEKPYQCKTCGRCFSVQGNLQKHERIHLGLKEFVCQYCNKAFTLNETLKIHERIHTGEKRYHCQFCFQRFLYLSTKRNHEQRHIREHNGKGYACFQCPKICKTAAALGMHQKKHLFKSPSQQEKIGDVCHENSNPLENQHFIGSEDNDQKDNIQTGVENVVL

SEQ ID NO: 15877 - protein, 712 aa, Homo Sapiens
MGMRIKLQSTNHPNNLLKELNKCRLSETMCDVTIVVGSRSFPAHKAVLACAAGYFQNLFLNTGLDAARTYVVDFITPANFEKVLSFVYTSELFTDLINVGVIYEVAERLGMEDLLQACHSTFPDLESTARAKPLTSTSESHSGTLSCPSAEPAHPLGELRGGGDYLGADRNYVLPSDAGGSYKEEEKNVASDANHSLHLPQPPPPPPKTEDHDTPAPFTSIPSMMTQPLLGTVSTGIQTSTSSCQPYKVQSNGDFSKNSFLTPDNAVDITTGTNSCLSNSEHSKDPGFGQMDELQLEDLGDDDLQFEDPAEDIGTTEEVIELSDDSEDELAFGENDNRENKAMPCQVCKKVLEPNIQLIRQHARDHVDLLTGNCKVCETHFQDRNSRVTHVLSHIGIFLFSCDMCETKFFTQWQLTLHRRDGIFENNIIVHPNDPLPGKLGLFSGAASPELKCAACGKVLAKDFHVVRGHILDHLNLKGQACSVCDQRHLNLCSLMWHTLSHLGISVFSCSVCANSFVDWHLLEKHMAVHQSLEDALFHCRLCSQSFKSEAAYRYHVSQHKCNSGLDARPGFGLQHPALQKRKLPAEEFLGEELALQGQPGNSKYSCKVCGKRFAHTSEFNYHRRIHTGEKPYQCKVCHKFFRGRSTIKCHLKTHSGALMYRCTVCGHYSSTLNLMSKHVGVHKGSLPPDFTIEQTFMYIIHSKEADKNPDS

SEQ ID NO: 15878 - protein, 1013 aa, Homo Sapiens
MPPPAEVTDPSHAPAVLRQLNEQRLRGLFCDVTLIAGDTKFPAHRSVLAASSPFFREALLTSAPLPLPPATGGAAPNPATTTAASSSSSSSSSSSSSSSSASSSSSSSSSSPPPASPPASSPPRVLELPGVPAAAFSDVLNFIYSARLALPGGGGDGAAVAEIGALGRRLGISRLQGLGEGGDAWVPPTPAPMATSQPEEDSFGPGPRPAGEWEGDRAEAQAPDLQCSLPRRPLPCPQCGKSFIHPKRLQTHEAQCRRGASTRGSTGLGAGGAGPGGPAGVDASALPPPVGFRGGPEHVVKVVGGHVLYVCAACERSYVTLSSLKRHSNVHSWRRKYPCRYCEKVFALAEYRTKHEVWHTGERRYQCIFCWETFVTYYNLKTHQRAFHGISPGLLASEKTPNGGYKPKLNTLKLYRLLPMRAAKRPYKTYSQGAPEAPLSPTLNTPAPVAMPASPPPGPPPAPEPGPPPSVITFAHPAPSVIVHGGSSSGGGGSGTASTGGSQAASVITYTAPPRPPKKREYPPPPPEPAATPTSPATAVSPATAAGPAMATTTEEAKGRNPRAGRTLTYTAKPVGGIGGGGGPPTGAGRGPSQLQAPPPLCQITVRIGEEAIVKRRISETDLRPGELSGEEMEESEEDEEEEDEEEEEEDEEESKAGGEDQLWRPYYSYKPKRKAGAAGGASVGGSGLPRGRRPPRWRQKLERRSWEETPAAESPAGRARTERRHRCGDCAQTFTTLRKLRKHQEAHGGGSHSSRAGRRPSTRFTCPHCAKVCKTAAALSRHGQRHAAERPGGTPTPVIAYSKGSAGTRPGDVKEEAPQEMQVSSSSGEAGGGSTAAEEASETASLQDPIISGGEEPPVVASGGSYVYPPVQEFPLALIGGGREPGGGRGKSGSEGPVGAGEGDRMEGIGAAKVTFYPEPYPLVYGPQLLAAYPYNFSNLAALPVALNMVLPDEKGAGALPFLPGVFGYAVNPQAAPPAPPTPPPPTLPPPIPPKGEGERAGVERTQKGDVG

SEQ ID NO: 15879 - protein, 1239 aa, Homo Sapiens
MELPNYSRQLLQQLYTLCKEQQFCDCTISIGTIYFRAHKLVLAAASLLFKTLLDNTDTISIDASVVSPEEFALLLEMMYTGKLPVGKHNFSKIISLADSLQMFDVAVSCKNLLTSLVNCSVQGQVVRDVSAPSSETFRKEPEKPQVEILSSEGAGEPHSSPELAATPGGPVKAETEEAAHSVSQEMSVNSPTAQESQRNAETPAETPTTAEACSPSPAVQTFSEAKKTSTEPGCERKHYQLNFLLENEGVFSDALMVTQDVLKKLEMCSEIKGPQKEMIVKCFEGEGGHSAFQRILGKVREESLDVQTVVSLLRLYQYSNPAVKTALLDRKPEDVDTVQPKGSTEEGKTLSVLLLEHKEDLIQCVTQLRPIMESLETAKEEFLTGTEKRVILNCCEGRTPKETIENLLHRMTEEKTLTAEGLVKLLQAVKTTFPNLGLLLEKLQKSATLPSTTVQPSPDDYGTELLRRYHENLSEIFTDNQILLKMISHMTSLAPGEREVMEKLVKRDSGSGGFNSLISAVLEKQTLSATAIWQLLLVVQETKTCPLDLLMEEIRREPGADAFFRAVTTPEHATLETILRHNQLILEAIQQKIEYKLFTSEEEHLAETVKEILSIPSETASPEASLRAVLSRAMEKSVPAIEICHLLCSVHKSFPGLQPVMQELAYIGVLTKEDGEKETWKVSNKFHLEANNKEDEKAAKEDSQPGEQNDQGETGSLPGQQEKEASASPDPAKKSFICKACDKSFHFYCRLKVHMKRCRVAKSKQVQCKECSETKDSKKELDKHQLEAHGAGGEPDAPKKKKKRLPVTCDLCGREFAHASGMQYHKLTEHFDEKPFSCEECGAKFAANSTLKNHLRLHTGDRPFMCKHCLMTFTQASALAYHTKKKHSEGKMYACQYCDAVFAQSIELSRHVRTHTGDKPYVCRDCGKGFRQANGLSIHLHTFHNIEDPYDCKKCRMSFPTLQDHRKHIHEVHSKEYHPCPTCGKIFSAPSMLERHVVTHVGGKPFSCGICNKAYQQLSGLWYHNRTHHPDVFAAQNHRSSKFSSLQCSSCDKTFPNTIEHKKHIKAEHADMKFHECDQCKELFPTPALLQVHVKCQHSGSQPFRCLYCAATFRFPGALQHHVTTEHFKQSETTFPCELCGELFTSQAQLDSHLESEHPKVMSTETQAAASQMAQVIQTPEPVAPTEQVITLEETQLAGSQVFVTLPDSQASQASSELVAVTVEDLLDGTVTLICGEAK

SEQ ID NO: 15880 - protein, 909 aa, Homo Sapiens
MKKRRKVTSNLEKIHLGYHKDSSEGNVAVECDQVTYTHSAGRPTPEALHCYQELPPSPDQRKLLSSLQYNKNLLKYLNDDRQKQPSFCDLLIIVEGKEFSAHKVVVAVGSSYFHACLSKNPSTDVVTLDHVTHSVFQHLLEFLYTSEFFVYKYEIPLVLEAAKFLDIIDAVKLLNNENVAPFHSELTEKSSPEETLNELTGRLSNNHQCKFCSRHFCYKKSLENHLAKTHRSLLLGKKHGLKMLERSFSARRSKRNRKCPVKFDDTSDDEQESGDGSDNLNQENFDKEKSDRNDSEDPGSEYNAEEDELEEEMSDEYSDIEEQSEKDHNDAEEEPEAGDSVGNVHEGLTPVVIQNSNKKILQCPKCDKTFDRIGKYESHTRVHTGEKPFECDICHQRYSTKSNLTVHRKKHSNETEFHKKEHKCPYCNKLHASKKTLAKHVKRFHPENAQEFISIKKTKSESWKCDICKKSFTRRPHLEEHMILHSQDKPFKCTYCEEHFKSRFARLKHQEKFHLGPFPCDICGRQFNDTGNLKRHIECTHGGKRKWTCFICGKSVRERTTLKEHLRIHSGEKPHLCSICGQSFRHGSSYRLHLRVHHDDKRYECDECGKTFIRHDHLTKHKKIHSGEKAHQCEECGKCFGRRDHLTVHYKSVHLGEKVWQKYKATFHQCDVCKKIFKGKSSLEMHFRTHSGEKPYKCQICNQSFRIKKTLTKHLVIHSDARPFNCQHCNATFKRKDKLKYHIDHVHEIKSPDDPLSTSEEKLVSLPVEYSSDDKIFQTETKQYMDQPKVYQSEAKTMLQNVSAEVCVPVTLVPVQMPDTPSDLVRHTTTLPPSSHEILSPQPQSTDYPRAADLAFLEKYTLTPQPANIVHPVRPEQMLDPREQSYLGTLLGLDSTTGVQNISTNEHHS

SEQ ID NO: 15881 - protein, 422 aa, Homo Sapiens
MEFPEHGGRLLGRLRQQRELGFLCDCTVLVGDARFPAHRAVLAACSVYFHLFYRDRPAGSRDTVRLNGDIVTAPAFGRLLDFMYEGRLDLRSLPVEDVLAAASYLHMYDIVKVCKGRLQEKDRSLDPGNPAPGAEPAQPPCPWPVWTADLCPAARKAKLPPFGVKAALPPRASGPPPCQVPEESDQALDLSLKSGPRQERVHPPCVLQTPLCSQRQPGAQPLVKDERDSLSEQEESSSSRSPHSPPKPPPVPAAKGLVVGLQPLPLSGEGSRELELGAGRLASEDELGPGGPLCICPLCSKLFPSSHVLQLHLSAHFRERDSTRARLSPDGVAPTCPLCGKTFSCTYTLKRHERTHSGEKPYTCVQCGKSFQYSHNLSRHTVVHTREKPHACRWCERRFTQSGDLYRHVRKFHCGLVKSLLV

SEQ ID NO: 15882 - protein, 467 aa, Homo Sapiens
MEPGTNSFRVEFPDFSSTILQKLNQQRQQGQLCDVSIVVQGHIFRAHKAVLAASSPYFCDQVLLKNSRRIVLPDVMNPRVFENILLSSYTGRLVMPAPEIVSYLTAASFLQMWHVVDKCTEVLEGNPTVLCQKLNHGSDHQSPSSSSYNGLVESFELGSGGHTDFPKAQELRDGENEEESTKDELSSQLTEHEYLPSNSSTEHDRLSTEMASQDGEEGASDSAEFHYTRPMYSKPSIMAHKRWIHVKPERLEQACEGMDVHATYDEHQVTESINTVQTEHTVQPSGVEEDFHIGEKKVEAEFDEQADESNYDEQVDFYGSSMEEFSGERSDGNLIGHRQEAALAAGYSENIEMVTGIKEEASHLGFSATDKLYPCQCGKSFTHKSQRDRHMSMHLGLRPYGCGVCGKKFKMKHHLVGHMKIHTGIKPYECNICAKRFMWRDSFHRHVTSCTKSYEAAKAEQNTTEAN

SEQ ID NO: 15883 - protein, 570 aa, Homo Sapiens
MGVKTFTHSSSSHSQEMLGKLNMLRNDGHFCDITIRVQDKIFRAHKVVLAACSDFFRTKLVGQAEDENKNVLDLHHVTVTGFIPLLEYAYTATLSINTENIIDVLAAASYMQMFSVASTCSEFMKSSILWNTPNSQPEKGLDAGQENNSNCNFTSRDGSISPVSSECSVVERTIPVCRESRRKRKSYIVMSPESPVKCGTQTSSPQVLNSSASYSENRNQPVDSSLAFPWTFPFGIDRRIQPEKVKQAENTRTLELPGPSETGRRMADYVTCESTKTTLPLGTEEDVRVKVERLSDEEVHEEVSQPVSASQSSLSDQQTVPGSEQVQEDLLISPQSSSIGSVDEGVSEGLPTLQSTSSTNAPPDDDDRLENVQYPYQLYIAPSTSSTERPSPNGPDRPFQCPTCGVRFTRIQNLKQHMLIHSGIKPFQCDRCGKKFTRAYSLKMHRLKHEGKRCFRCQICSATFTSFGEYKHHMRVSRHIIRKPRIYECKTCGAMLTNSGNLIVHLRSLNHEASELANYFQSSDFLVPDYLNQEQEETLVQYDLGEHGFESNSSVQMPVISQYHSKGKEP

SEQ ID NO: 15884 - protein, 511 aa, Homo Sapiens
MAAAEAVHHIHLQNFSRSLLETLNGQRLGGHFCDVTVRIREASLRAHRCVLAAGSPFFQDKLLLGHSEIRVPPVVPAQTVRQLVEFLYSGSLVVAQGEALQVLTAASVLRIQTVIDECTQIIARARAPGTSAPTPLPTPVPPPLAPAQLRHRLRHLLAARPPGHPGAAHSRKQRQPARLQLPAPPTPAKAEGPDADPSLSAAPDDRGDEDDEESDDETDGEDGEGGGPGEGQAPPSFPDCAAGFLTAAADSACEEPPAPTGLADYSGAGRDFLRGAGSAEDVFPDSYVSTWHDEDGAVPEGCPTETPVQPDCILSGSRPPGVKTPGPPVALFPFHLGAPGPPAPPPSAPSGPAPAPPPAFYPTLQPEAAPSTQLGEVPAPSAAPTTAPSGTPARTPGAEPPTYECSHCRKTFSSRKNYTKHMFIHSGEKPHQCAVCWRSFSLRDYLLKHMVTHTGVRAFQCAVCAKRFTQKSSLNVHMRTHRPERAPCPACGKVFSHRALLERHLAAHPAP

SEQ ID NO: 15885 - protein, 589 aa, Homo Sapiens
MNNRKEDMEITSHYRHLLRELNEQRQHGVLCDVCVVVEGKVFKAHKNVLLGSSRYFKTLYCQVQKTSEQATVTHLDIVTAQGFKAIIDFMYSAHLALTSRNVIEVMSAASFLQMTDIVQACHDFIKAALDISIKSDASDELAEFEIGASSSSSTEALISAVMAGRSISPWLARRTSPANSSGDSAIASCHDGGSSYGKEDQEPKADGPDDVSSQPLWPGDVGYGPLRIKEEQVSPSQYGGSELPSAKDGAVQNSFSEQSAGDAWQPTGRRKNRKNKETVRHITQQVEDDSRASSPVPSFLPTSGWPFSSRDSNADLSVTEASSSDSRGERAELYAQVEEGLLGGEASYLGPPLTPEKDDALHQATAVANLRAALMSKNSLLSLKADVLGDDGSLLFEYLPRGAHSLSLNEFTVIRKKFKCPYCSFSAMHQCILKRHMRSHTGERPYPCEICGKKFTRREHMKRHTLVHSKDKKYVCKVCSRVFMSAASVGIRHGSRRHGVCTDCAGRGMAGPLDHGGGGGEGSPEALFPGDGPYLEDPEDPRGEAEELGEDDEGLAPEDALLADDKDEEDSPRPRSPPGGPDKDFAWLS

SEQ ID NO: 15886 - protein, 747 aa, Homo Sapiens
MGRLNEQRLFQPDLCDVDLVLVPQRSVFPAHKGVLAAYSQFFHSLFTQNKQLQRVELSLEALAPGGLQQILNFIYTSKLLVNAANVHEVLSAASLLQMADIAASCQELLDARSLGPPGPGTVALAQPAASCTPAAPPYYCDIKQEADTPGLPKIYAREGPDPYSVRVEDGAGTAGGTVPATIGPAQPFFKEEKEGGVEEAGGPPASLCKLEGGEELEEELGGSGTYSRREQSQIIVEVNLNNQTLHVSTGPEGKPGAGPSPATVVLGREDGLQRHSDEEEEDDEEEEEEEEEEEGGGSGREEEEEEEGGSQGEEEEEEEDGHSEQEEEEEEEEEEGPSEQDQESSEEEEGEEGEAGGKQGPRGSRSSRADPPPHSHMATRSRENARRRGTPEPEEAGRRGGKRPKPPPGVASASARGPPATDGLGAKVKLEEKQHHPCQKCPRVFNNRWYLEKHMNVTHSRMQICDQCGKRFLLESELLLHRQTDCERNIQCVTCGKAFKKLWSLHEHNKIVHGYAEKKFSCEICEKKFYTMAHVRKHMVAHTKDMPFTCETCGKSFKRSMSLKVHSLQHSGEKPFRCENCNERFQYKYQLRSHMSIHIGHKQFMCQWCGKDFNMKQYFDEHMKTHTGEKPYICEICGKSFTSRPNMKRHRRTHTGEKPYPCDVCGQRFRFSNMLKAHKEKCFRVSHTLAGDGVPAAPGLPPTQPQAHALPLLPGLPQTLPPPPHLPPPPPLFPTTASPGGRMNANN

SEQ ID NO: 15887 - protein, 688 aa, Homo Sapiens
MDGSFVQHSVRVLQELNKQREKGQYCDATLDVGGLVFKAHWSVLACCSHFFQSLYGDGSGGSVVLPAGFAEIFGLLLDFFYTGHLALTSGNRDQVLLAARELRVPEAVELCQSFKPKTSVGQAAGGQSGLGPPASQNVNSHVKEPAGLEEEEVSRTLGLVPRDQEPRGSHSPQRPQLHSPAQSEGPSSLCGKLKQALKPCPLEDKKPEDCKVPPRPLEAEGAQLQGGSNEWEVVVQVEDDGDGDYMSEPEAVLTRRKSNVIRKPCAAEPALSAGSLAAEPAENRKGTAVPVECPTCHKKFLSKYYLKVHNRKHTGEKPFECPKCGKCYFRKENLLEHEARNCMNRSEQVFTCSVCQETFRRRMELRVHMVSHTGEMPYKCSSCSQQFMQKKDLQSHMIKLHGAPKPHACPTCAKCFLSRTELQLHEAFKHRGEKLFVCEECGHRASSRNGLQMHIKAKHRNERPHVCEFCSHAFTQKANLNMHLRTHTGEKPFQCHLCGKTFRTQASLDKHNRTHTGERPFSCEFCEQRFTEKGPLLRHVASRHQEGRPHFCQICGKTFKAVEQLRVHVRRHKGVRKFECTECGYKFTRQAHLRRHMEIHDRVENYNPRQRKLRNLIIEDEKMVVVALQPPAELEVGSAEVIVESLAQGGLASQLPGQRLCAEESFTGPGVLEPSLIITAAVPEDCDT

SEQ ID NO: 15888 - protein, 765 aa, Homo Sapiens
MDPVATHSCHLLQQLHEQRIQGLLCDCMLVVKGVCFKAHKNVLAAFSQYFRSLFQNSSSQKNDVFHLDVKNVSGIGQILDFMYTSHLDLNQDNIQVMLDTAQCLQVQNVLSLCHTFLKSATVVQPPGMPCNSTLSLQSTLTPDATCVISENYPPHLLQECSADAQQNKTLDESHPHASPSVNRHHSAGEISKQAPDTSDGSCTELPFKQPNYYYKLRNFYSKQYHKHAAGPSQERVVEQPFAFSTSTDLTTVESQPCAVSHSECILESPEHLPSNFLAQPVNDSAPHPESDATCQQPVKQMRLKKAIHLKKLNFLKSQKYAEQVSEPKSDDGLTKRLESASKNTLEKASSQSAEEKESEEVVSCENFNCISETERPEDPAALEDQSQTLQSQRQYACELCGKPFKHPSNLELHKRSHTGEKPFECNICGKHFSQAGNLQTHLRRHSGEKPYICEICGKRFAASGDVQRHIIIHSGEKPHLCDICGRGFSNFSNLKEHKKTHTADKVFTCDECGKSFNMQRKLVKHRIRHTGERPYSCSACGKCFGGSGDLRRHVRTHTGEKPYTCEICNKCFTRSAVLRRHKKMHCKAGDESPDVLEELSQAIETSDLEKSQSSDSFSQDTSVTLMPVSVKLPVHPVENSVAEFDSHSGGSYCKLRSMIQPHGVSDQEKLSLDPGKLAKPQMQQTQPQAYAYSDVDTPAGGEPLQADGMAMIRSSLAALDNHGGDPLGSRASSTTYRNSEGQFFSSMTLWGLAMKTLQNENELDQ

SEQ ID NO: 15889 - protein, 677 aa, Homo Sapiens
MDFPGHFEQIFQQLNYQRLHGQLCDCVIVVGNRHFKAHRSVLAACSTHFRALFSVAEGDQTMNMIQLDSEVVTAEAFAALIDMMYTSTLMLGESNVMDVLLAASHLHLNSVVKACKHYLTTRTLPMSPPSERVQEQSARMQRSFMLQQLGLSIVSSALNSSQNGEEQPAPMSSSMRSNLDQRTPFPMRRLHKRKQSAEERARQRLRPSIDESAISDVTPENGPSGVHSREEFFSPDSLKIVDNPKADGMTDNQEDSAIMFDQSFGTQEDAQVPSQSDNSAGNMAQLSMASRATQVETSFDQEAAPEKSSFQCENPEVGLGEKEHMRVVVKSEPLSSPEPQDEVSDVTSQAEGSESVEVEGVVVSAEKIDLSPESSDRSFSDPQSSTDRVGDIHILEVTNNLEHKSTFSISNFLNKSRGNNFTANQNNDDNIPNTTSDCRLESEAPYLLSPEAGPAGGPSSAPGSHVENPFSEPADSHFVRPMQEVMGLPCVQTSGYQGGEQFGMDFSRSGLGLHSSFSRVMIGSPRGGASNFPYYRRIAPKMPVVTSVRSSQIPENSTSSQLMMNGATSSFENGHPSQPGPPQLTRASADVLSKCKKALSEHNVLVVEGARKYACKICCKTFLTLTDCKKHIRVHTGEKPYACLKCGKRFSQSSHLYKHSKTTCLRWQSSNLPSTLL

SEQ ID NO: 15890 - protein, 424 aa, Homo Sapiens
MAAESDVLHFQFEQQGDVVLQKMNLLRQQNLFCDVSIYINDTEFQGHKVILAACSTFMRDQFLLTQSKHVRITILQSAEVGRKLLLSCYTGALEVKRKELLKYLTAASYLQMVHIVEKCTEALSKYLEIDLSMKNNNQHTDLCQSSDPDVKNEDENSDKDCEIIEISEDSPVNIDFHVKEEESNALQSTVESLTSERKEMKSPELSTVDIGFKDNEICILHVESISTAGVENGQFSQPCTSSKASMYFSETQHSLINSTVESRVAEVPGNQDQGLFCENTEGSYGTVSEIQNLEEGYSLRHQCPRCPRGFLHVENYLRHLKMHKLFLCLQCGKTFTQKKNLNRHIRGHMGIRPFQCTVCLKTFTAKSTLQDHLNIHSGDRPYKCHCCDMDFKHKSALKKHLTSVHGRSSGEKLSRPDLKRQSLL

SEQ ID NO: 15891 - protein, 584 aa, Homo Sapiens
MAGGVDGPIGIPFPDHSSDILSGLNEQRTQGLLCDVVILVEGREFPTHRSVLAACSQYFKKLFTSGAVVDQQNVYEIDFVSAEALTALMDFAYTATLTVSTANVGDILSAARLLEIPAVSHVCADLLDRQILAADAGADAGQLDLVDQIDQRNLLRAKEYLEFFQSNPMNSLPPAAAAAAASFPWSAFGASDDDLDATKEAVAAAVAAVAAGDCNGLDFYGPGPPAERPPTGDGDEGDSNPGLWPERDEDAPTGGLFPPPVAPPAATQNGHYGRGGEEEAASLSEAAPEPGDSPGFLSGAAEGEDGDGPDVDGLAASTLLQQMMSSVGRAGAAAGDSDEESRADDKGVMDYYLKYFSGAHDGDVYPAWSQKVEKKIRAKAFQKCPICEKVIQGAGKLPRHIRTHTGEKPYECNICKVRFTRQDKLKVHMRKHTGEKPYLCQQCGAAFAHNYDLKNHMRVHTGLRPYQCDSCCKTFVRSDHLHRHLKKDGCNGVPSRRGRKPRVRGGAPDPSPGATATPGAPAQPSSPDARRNGQEKHFKDEDEDEDVASPDGLGRLNVAGAGGGGDSGGGPGAATDGNFTAGLA

SEQ ID NO: 15892 - protein, 539 aa, Homo Sapiens; identical to SEQ ID NO: 15784

SEQ ID NO: 15893 - protein, 619 aa, Homo Sapiens
MANDIDELIGIPFPNHSSEVLCSLNEQRHDGLLCDVLLVVQEQEYRTHRSVLAACSKYFKKLFTAGTLASQPYVYEIDFVQPEALAAILEFAYTSTLTITAGNVKHILNAARMLEIQCIVNVCLEIMEPGGDGGEEDDKEDDDDDEDDDDEEDEEEEEEEEEDDDDDTEDFADQENLPDPQDISCHQSPSKTDHLTEKAYSDTPRDFPDSFQAGSPGHLGVIRDFSIESLLRENLYPKANIPDRRPSLSPFAPDFFPHLWPGDFGAFAQLPEQPMDSGPLDLVIKNRKIKEEEKEELPPPPPPPFPNDFFKDMFPDLPGGPLGPIKAENDYGAYLNFLSATHLGGLFPPWPLVEERKLKPKASQQCPICHKVIMGAGKLPRHMRTHTGEKPYMCTICEVRFTRQDKLKIHMRKHTGERPYLCIHCNAKFVHNYDLKNHMRIHTGVRPYQCEFCYKSFTRSDHLHRHIKRQSCRMARPRRGRKPAAWRAASLLFGPGGPAPDKAAFVMPPALGEVGGHLGGAAVCLPGPSPAKHFLAAPKGALSLQELERQFEETQMKLFGRAQLEAERNAGGLLAFALAENVAAARPYFPLPDPWAAGLAGLPGLAGLNHVASMSEANN

SEQ ID NO: 15894 - protein, 441 aa, Homo Sapiens
MEISSHQSHLLQQLNEQRRQDVFCDCSILVEGKVFKAHRNVLFASSGYFKMLLSQNSKETSQPTTATFQAFSPDTFTVILDFVYSGKLSLTGQNVIEVMSAASFLQMTDVISVCKTFIKSSLDISEKEKDRYFSLSDKDANSNGVERSSFYSGGWQEGSSSPRSHLSPEQGTGIISGKSWNKYNYHPASQKNTQQPLAKHEPRKESIKKTKHLRLSQPSEVTHYKSSKREVRTSDSSSHVSQSEEQAQIDAEMDSTPVGYQYGQGSDVTSKSFPDDLPRMRFKCPYCTHVVKRKADLKRHLRCHTGERPYPCQACGKRFSRLDHLSSHFRTIHQACKLICRKCKRHVTDLTGQVVQEGTRRYRLCNECLAEFGIDSLPIDLEAEQHLMSPSDGDKDSRWHLSEDENRSYVEIVEDGSGDLVIQQVDDSEEEEEKEIKPNIR

SEQ ID NO: 15895 - protein, 473 aa, Homo Sapiens
METPTPLPPVPASPTCNPAPRTIQIEFPQHSSSLLESLNRHRLEGKFCDVSLLVQGRELRAHKAVLAAASPYFHDKLLLGDAPRLTLPSVIEADAFEGLLQLIYSGRLRLPLDALPAHLLVASGLQMWQVVDQCSEILRELETSGGGISARGGNSYHALLSTTSSTGGWCIRSSPFQTPVQSSASTESPASTESPVGGEGSELGEVLQIQVEEEEEEEEDDDDEDQGSATLSQTPQPQRVSGVFPRPHGPHPLPMTATPRKLPEGESAPLELPAPPALPPKIFYIKQEPFEPKEEISGSGTQPGGAKEETKVFSGGDTEGNGELGFLLPSGPGPTSGGGGPSWKPVDLHGNEILSGGGGPGGAGQAVHGPVKLGGTPPADGKRFGCLCGKRFAVKPKRDRHIMLTFSLRPFGCGICNKRFKLKHHLTEHMKTHAGALHACPHCGRRFRVHACFLRHRDLCKGQGWATAHWTYK

SEQ ID NO: 15896 - protein, 434 aa, Homo Sapiens
MPDRDSYANGTGSSGGGPGGGGSEEASGAGVGSGGASSDAICRDFLRNVCKRGKRCRYRHPDMSEVSNLGVSKNEFIFCHDFQNKECSRPNCRFIHGSKEDEDGYKKTGELPPRLRQKVAAGLGLSPADLPNGKEEVPICRDFLKGDCQRGAKCKFRHLQRDFEFDARGGGGTGGGSTGSVLPGRRHDLYDIYDLPDRGFEDHEPGPKRRRGGCCPPDGPHFESYEYSLAPPRGVECRLLEEENAMLRKRVEELKKQVSNLLATNEVLLEQNAQFRNQAKVITLSSTAPATEQTLAPTVGTVATFNHGIAQTHTTLSSQALQPRPVSQQELVAPAGAPAAPPTNAAPPAAPPPPPPHLTPEITPLSAALAQTIAQGMAPPPVSMAPVAVSVAPVAPVAVSMAQPLAGITMSHTTTPMVTYPIASQSMRITAMPH

SEQ ID NO: 15897 - protein, 810 aa, Homo Sapiens
MPNQGEDCYFFFYSTCTKGDSCPFRHCEAAIGNETVCTLWQEGRCFRQVCRFRHMEIDKKRSEIPCYWENQPTGCQKLNCAFHHNRGRYVDGLFLPPSKTVLPTVPESPEEEVKASQLSVQQNKLSVQSNPSPQLRSVMKVESSENVPSPTHPPVVINAADDDEDDDDQFSEEGDETKTPTLQPTPEVHNGLRVTSVRKPAVNIKQGECLNFGIKTLEEIKSKKMKEKSKKQGEGSSGVSSLLLHPEPVPGPEKENVRTVVRTVTLSTKQGEEPLVRLSLTERLGKRKFSAGGDSDPPLKRSLAQRLGKKVEAPETNIDKTPKKAQVSKSLKERLGMSADPDNEDATDKVNKVGEIHVKTLEEILLERASQKRGELQTKLKTEGPSKTDDSTSGARSSSTIRIKTFSEVLAEKKHRQQEAERQKSKKDTTCIKLKIDSEIKKTVVLPPIVASRGQSEEPAGKTKSMQEVHIKTLEEIKLEKALRVQQSSESSTSSPSQHEATPGARRLLRITKRTGMKEEKNLQEGNEVDSQSSIRTEAKEASGETTGVDITKIQVKRCETMREKHMQKQQEREKSVLTPLRGDVASCNTQVAEKPVLTAVPGITRHLTKRLPTKSSQKVEVETSGIGDSLLNVKCAAQTLEKRGKAKPKVNVKPSVVKVVSSPKLAPKRKAVEMHAAVIAAVKPLSSSSVLQEPPAKKAAVAVVPLVSEDKSVTVPEAENPRDSLVLPPTQSSSDSSPPEVSGPSSSQMSMKTRRLSSASTGKPPLSVEDDFEKLIWEISGGKLEAEIDLDPGKDEDDLLLELSEMIDS

SEQ ID NO: 15898 - protein, 599 aa, Homo Sapiens
MSGPCGEKPVLEASPTMSLWEFEDSHSRQGTPRPGQELAAEEASALELQMKVDFFRKLGYSSTEIHSVLQKLGVQADTNTVLGELVKHGTATERERQTSPDPCPQLPLVPRGGGTPKAPNLEPPLPEEEKEGSDLRPVVIDGSNVAMSHGNKEVFSCRGILLAVNWFLERGHTDITVFVPSWRKEQPRPDVPITDQHILRELEKKKILVFTPSRRVGGKRVVCYDDRFIVKLAYESDGIVVSNDTYRDLQGERQEWKRFIEERLLMYSFVNDKFMPPDDPLGRHGPSLDNFLRKKPLTLEHRKQPCPYGRKCTYGIKCRFFHPERPSCPQRSVADELRANALLSPPRAPSKDKNGRRPSPSSQSSSLLTESEQCSLDGKKLGAQASPGSRQEGLTQTYAPSGRSLAPSGGSGSSFGPTDWLPQTLDSLPYVSQDCLDSGIGSLESQMSELWGVRGGGPGEPGPPRAPYTGYSPYGSELPATAAFSAFGRAMGAGHFSVPADYPPAPPAFPPREYWSEPYPLPPPTSVLQEPPVQSPGAGRSPWGRAGSLAKEQASVYTKLCGVFPPHLVEAVMGRFPQLLDPQQLAAEILSYKSQHPSE

SEQ ID NO: 15899 - protein, 836 aa, Homo Sapiens
MTATAEVETPKMEKSASKEEKQQPKQDSTEQGNADSEEWMSSESDPEQISLKSSDNSKSCQPRDGQLKKKEMHSKPHRQLCRSPCLDRPSFSQSSILQDGKLDLEKEYQAKMEFALKLGYAEEQIQSVLNKLGPESLINDVLAELVRLGNKGDSEGQINLSLLVPRGPSSREIASPELSLEDEIDNSDNLRPVVIDGSNVAMSHGNKEEFSCRGIQLAVDWFLDKGHKDITVFVPAWRKEQSRPDAPITDQDILRKLEKEKILVFTPSRRVQGRRVVCYDDRFIVKLAFDSDGIIVSNDNYRDLQVEKPEWKKFIEERLLMYSFVNDKFMPPDDPLGRHGPSLENFLRKRPIVPEHKKQPCPYGKKCTYGHKCKYYHPERANQPQRSVADELRISAKLSTVKTMSEGTLAKCGTGMSSAKGEITSEVKRVAPKRQSDPSIRSVAMEPEEWLSIARKPEASSVPSLVTALSVPTIPPPKSHAVGALNTRSASSPVPGSSHFPHQKASLEHMASMQYPPILVTNSHGTPISYAEQYPKFESMGDHGYYSMLGDFSKLNINSMHNREYYMAEVDRGVYARNPNLCSDSRVSHTRNDNYSSYNNVYLAVADTHPEGNLKLHRSASQNRLQPFPHGYHEALTRVQSYGPEDSKQGPHKQSVPHLALHAQHPSTGTRSSCPADYPMPPNIHPGATPQPGRALVMTRMDSISDSRLYESNPVRQRRPPLCREQHASWDPLPCTTDSYGYHSYPLSNSLMQPCYEPVMVRSVPEKMEQLWRNPWVGMCNDSREHMIPEHQYQTYKNLCNIFPSNIVLAVMEKNPHTADAQQLAALIVAKLRAAR

SEQ ID NO: 15900 - protein, 1668 aa, Homo Sapiens
MSKIRRKVTVENTKTISDSTSRRPSVFERLGPSTGSTAETQCRNWLKTGNCLYGNTCRFVHGPSPRGKGYSSNYRRSPERPTGDLRERMKNKRQDVDTEPQKRNTEESSSPVRKESSRGRHREKEDIKITKERTPESEEENVEWETNRDDSDNGDINYDYVHELSLEMKRQKIQRELMKLEQENMEKREEIIIKKEVSPEVVRSKLSPSPSLRKSSKSPKRKSSPKSSSASKKDRKTSAVSSPLLDQQRNSKTNQSKKKGPRTPSPPPPIPEDIALGKKYKEKYKVKDRIEEKTRDGKDRGRDFERQREKRDKPRSTSPAGQHHSPISSRHHSSSSQSGSSIQRHSPSPRRKRTPSPSYQRTLTPPLRRSASPYPSHSLSSPQRKQSPPRHRSPMREKGRHDHERTSQSHDRRHERREDTRGKRDREKDSREEREYEQDQSSSRDHRDDREPRDGRDRRDARDTRDRRELRDSRDMRDSREMRDYSRDTKESRDPRDSRSTRDAHDYRDREGRDTHRKEDTYPEESRSYGRNHLREESSRTEIRNESRNESRSEIRNDRMGRSRGRVPELPEKGSRGSRGSQIDSHSSNSNYHDSWETRSSYPERDRYPERDNRDQARDSSFERRHGERDRRDNRERDQRPSSPIRHQGRNDELERDERREERRVDRVDDRRDERARERDRERERDRERERERERERDREREKERELERERAREREREREKERDRERDRDRDHDRERERERERDREKEREREREERERERERERERERERERERERARERDKERERQRDWEDKDKGRDDRREKREEIREDRNPRDGHDERKSKKRYRNEGSPSPRQSPKRRREHSPDSDAYNSGDDKNEKHRLLSQVVRPQESRSLSPSHLTEDRQGRWKEEDRKPERKESSRRYEEQELKEKVSSVDKQREQTEILESSRMRAQDIIGHHQSEDRETSDRAHDENKKKAKIQKKPIKKKKEDDVGIERGNIETTSEDGQVFSPKKGQKKKSIEKKRKKSKGDSDISDEEAAQQSKKKRGPRTPPITTKEELVEMCNGKNGILEDSQKKEDTAFSDWSDEDVPDRTEVTEAEHTATATTPGSTPSPLSSLLPPPPPVATATATTVPATLAATTAAAATSFSTSAITISTSATPTNTTNNTFANEDSHRKCHRTRVEKVETPHVTIEDAQHRKPMDQKRSSSLGSNRSNRSHTSGRLRSPSNDSAHRSGDDQSGRKRVLHSGSRDREKTKSLEITGERKSRIDQLKRGEPSRSTSSDRQDSRSHSSRRSSPESDRQVHSRSGSFDSRDRLQERDRYEHDRERERERRDTRQREWDRDADKDWPRNRDRDRLRERERERERDKRRDLDRERERLISDSVERDRDRDRDRTFESSQIESVKRCEAKLEGEHERDLESTSRDSLALDKERMDKDLGSVQGFEETNKSERTESLEGDDESKLDDAHSLGSGAGEGYEPISDDELDEILAGDAEKREDQQDEEKMPDPLDVIDVDWSGLMPKHPKEPREPGAALLKFTPGAVMLRVGISKKLAGSELFAKVKETCQRLLEKPKDADNLFEHELGALNMAALLRKEERASLLSNLGPCCKALCFRRDSAIRKQLVKNEKGTIKQAYTSAPMVDNELLRLSLRLFKRKTTCHAPGHEKTEDNKLSQSSIQQELCVS

SEQ ID NO: 15901 - protein, 736 aa, Homo Sapiens
MEIGTEISRKIRSAIKGKLQELGAYVDEELPDYIMVMVANKKSQDQMTEDLSLFLGNNTIRFTVWLHGVLDKLRSVTTEPSSLKSSDTNIFDSNVPSNKSNFSRGDERRHEAAVPPLAIPSARPEKRDSRVSTSSQESKTTNVRQTYDDGAATRLMSTVKPLREPAPSEDVIDIKPEPDDLIDEDLNFVQENPLSQKKPTVTLTYGSSRPSIEIYRPPASRNADSGVHLNRLQFQQQQNSIHAAKQLDMQSSWVYETGRLCEPEVLNSLEETYSPFFRNNSEKMSMEDENFRKRKLPVVSSVVKVKKFNHDGEEEEEDDDYGSRTGSISSSVSVPAKPERRPSLPPSKQANKNLILKAISEAQESVTKTTNYSTVPQKQTLPVAPRTRTSQEELLAEVVQGQSRTPRISPPIKEEETKGDSVEKNQGTQQRQLLSRLQIDPVMAETLQMSQDYYDMESMVHADTRSFILKKPKLSEEVVVAPNQESGMKTADSLRVLSGHLMQTRDLVQPDKPASPKFIVTLDGVPSPPGYMSDQEEDMCFEGMKPVNQTAASNKGLRGLLHPQQLHLLSRQLEDPNGSFSNAEMSELSVAQKPEKLLERCKYWPACKNGDECAYHHPISPCKAFPNCKFAEKCLFVHPNCKYDAKCTKPDCPFTHVSRRIPVLSPKPAVAPPAPPSSSQLCRYFPACKKMECPFYHPKHCRFNTQCTRPDCTFYHPTINVPPRHALKWIRPQTSE

SEQ ID NO: 15902 - protein, 426 aa, Homo Sapiens
MPPKKQAQAGGSKKAEQKKKEKIIEDKTFGLKNKKGAKQQKFIKAVTHQVKFGQQNPRQVAQSEAEKKLKKDDKKKELQELNELFKPVVAAQKISKGADPKSVVCAFFKQGQCTKGDKCKFSHDLTLERKCEKRSVYIDARDEELEKDTMDNWDEKKLEEVVNKKHGEAEKKKPKTQIVCKHFLEAIENNKYGWFWVCPGGGDICMYRHALPPGFVLKKDKKKEEKEDEISLEDLIERERSALGPNVTKITLESFLAWKKRKRQEKIDKLEQDMERRKADFKAGKALVISGREVFEFRPELVNDDDEEADDTRYTQGTGGDEVDDSVSVNDIDLSLYIPRDVDETGITVASLERFSTYTSDKDENKLSEASGGRAENGERSDLEEDNEREGTENGAIDAVPVDENLFTGEDLDELEEELNTLDLEE

SEQ ID NO: 15903 - protein, 953 aa, Homo Sapiens
MDVAESPERDPHSPEDEEQPQGLSDDDILRDSGSDQDLDGAGVRASDLEDEESAARGPSQEEEDNHSDEEDRASEPKSQDQDSEVNELSRGPTSSPCEEEGDEGEEDRTSDLRDEASSVTRELDEHELDYDEEVPEEPAPAVQEDEAEKAGAEDDEEKGEGTPREEGKAGVQSVGEKESLEAAKEKKKEDDDGEIDDGEIDDDDLEEGEVKDPSDRKVRPRPTCRFFMKGNCTWGMNCRFIHPGVNDKGNYSLITKADPFPPNGAPPLGPHPLMPANPWGGPVVDEILPPPPPEPPTESAWERGLRHAKEVLKKATIRKEQEPDFEEKRFTVTIGEDEREFDKENEVFRDWNSRIPRDVRDTVLEPYADPYYDYEIERFWRGGQYENFRVQYTETEPYHNYRERERERERENRQRERERERERDRERERRQRERERERERERDKERQRRKEEWERERAKRDEKDRQHRDRDREKEREKEKGKPKPRSPQPPSRQAEPPKKEAATTGPQVKRADEWKDPWRRSKSPKKKLGVSVSPSRARRRRKTSASSASASNSSRSSSRSSSYSGSGSSRSRSRSSSYSSYSSRSSRHSSFSGSRSRSRSFSSSPSPSPTPSPHRPSIRTKGEPAPPPGKAGEKSVKKPAPPPAPPQATKTTAPVPEPTKPGDPREARRKERPARTPPRRRTLSGSGSGSGSSYSGSSSRSRSLSVSSVSSVSSATSSSSSAHSVDSEDMYADLASPVSSASSRSPAPAQTRKEKGKSKKEDGVKEEKRKRDSSTQPPKSAKPPAGGKSSQQPSTPQQAPPGQPQQGTFVAHKEIKLTLLNKAADKGSRKRYEPSDKDRQSPPPAKRPNTSPDRGSRDRKSGGRLGSPKPERQRGQNSKAPAAPADRKRQLSPQSKSSSKVTSVPGKASDPGAASTKSGKASTLSRREELLKQLKAVEDAIARKRAKIPGKA

SEQ ID NO: 15904 - protein, 948 aa, Homo Sapiens
MEEKEILRRQIRLLQGLIDDYKTLHGNAPAPGTPAASGWQPPTYHSGRAFSARYPRPSRRGYSSHHGPSWRKKYSLVNRPPGPSDPPADHAVRPLHGARGGQPPVPQQHVLERQVQLSQGQNVVIKVKPPSKSGSASASGAQRGSLEEFEETPWSDQRPREGEGEPPRGQLQPSRPTRARGTCSVEDPLLVCQKEPGKPRMVKSVGSVGDSPREPRRTVSESVIAVKASFPSSALPPRTGVALGRKLGSHSVASCAPQLLGDRRVDAGHTDQPVPSGSVGGPARPASGPRQAREASLVVTCRTNKFRKNNYKWVAASSKSPRVARRALSPRVAAENVCKASAGMANKVEKPQLIADPEPKPRKPATSSKPGSAPSKYKWKASSPSASSSSSFRWQSEASSKDHASQLSPVLSRSPSGDRPAVGHSGLKPLSGETPLSAYKVKSRTKIIRRRSSTSLPGDKKSGTSPAATAKSHLSLRRRQALRGKSSPVLKKTPNKGLVQVTTHRLCRLPPSRAHLPTKEASSLHAVRTAPTSKVIKTRYRIVKKTPASPLSAPPFPLSLPSWRARRLSLSRSLVLNRLRPVASGGGKAQPGSPWWRSKGYRCIGGVLYKVSANKLSKTSGQPSDAGSRPLLRTGRLDPAGSCSRSLASRAVQRSLAIIRQARQRREKRKEYCMYYNRFGRCNRGERCPYIHDPEKVAVCTRFVRGTCKKTDGTCPFSHHVSKEKMPVCSYFLKGICSNSNCPYSHVYVSRKAEVCSDFLKGYCPLGAKCKKKHTLLCPDFARRGACPRGAQCQLLHRTQKRHSRRAATSPAPGPSDATARSRVSASHGPRKPSASQRPTRQTPSSAALTAAAVAAPPHCPGGSASPSSSKASSSSSSSSSPPASLDHEAPSLQEAALAAACSNRLCKLPSFISLQSSPSPGAQPRVRAPRAPLTKDSGKPLHIKPRL

SEQ ID NO: 15905 - protein, 1303 aa, Homo Sapiens
MEAAPGTPPPPPSESPPPPSPPPPSTPSPPPCSPDARPATPHLLHHRLPLPDDREDGELEEGELEDDGAEETQDTSGGPERSRKEKGEKHHSDSDEEKSHRRLKRKRKKEREKEKRRSKKRRKSKHKRHASSSDDFSDFSDDSDFSPSEKGHRKYREYSPPYAPSHQQYPPSHATPLPKKAYSKMDSKSYGMYEDYENEQYGEYEGDEEEDMGKEDYDDFTKELNQYRRAKEGSSRGRGSRGRGRGYRGRGSRGGSRGRGMGRGSRGRGRGSMGGDHPEDEEDFYEEEMDYGESEEPMGDDDYDEYSKELNQYRRSKDSRGRGLSRGRGRGSRGRGKGMGRGRGRGGSRGGMNKGGMNDDEDFYDEDMGDGGGGSYRSRDHDKPHQQSDKKGKVICKYFVEGRCTWGDHCNFSHDIELPKKRELCKFYITGFCARAENCPYMHGDFPCKLYHTTGNCINGDDCMFSHDPLTEETRELLDKMLADDAEAGAEDEKEVEELKKQGINPLPKPPPGVGLLPTPPRPPGPQAPTSPNGRPMQGGPPPPPPPPPPPPGPPQMPMPVHEPLSPQQLQQQDMYNKKIPSLFEIVVRPTGQLAEKLGVRFPGPGGPPGPMGPGPNMGPPGPMGGPMHPDMHPDMHPDMHPDMHADMHADMPMGPGMNPGPPMGPGGPPMMPYGPGDSPHSGMMPPIPPAQNFYENFYQQQEGMEMEPGLLGDAEDYGHYEELPGEPGEHLFPEHPLEPDSFSEGGPPGRPKPGAGVPDFLPSAQRALYLRIQQKQQEEEERARRLAESSKQDRENEEGDTGNWYSSDEDEGGSSVTSILKTLRQQTSSRPPASVGELSSSGLGDPRLQKGHPTGSRLADPRLSRDPRLTRHVEASGGSGPGDSGPSDPRLARALPTSKPEGSLHSSPVGPSSSKGSGPPPTEEEEGERALREKAVNIPLDPLPGHPLRDPRSQLQQFSHIKKDVTLSKPSFARTVLWNPEDLIPLPIPKQDAVPPVPAALQSMPTLDPRLHRAATAGPPNARQRPGASTDSSTQGANLPDFELLSRILKTVNATGSSAAPGSSDKPSDPRVRKAPTDPRLQKPTDSTASSRAAKPGPAEAPSPTASPSGDASPPATAPYDPRVLAAGGLGQGGGGGQSSVLSGISLYDPRTPNAGGKATEPAADTGAQPKGAEGNGKSSASKAKEPPFVRKSALEQPETGKAGADGGTPTDRYNSYNRPRPKAAAAPAATTATPPPEGAPPQPGVHNLPVPTLFGTVKQTPKTGSGSPFAGNSPAREGEQDAASLKDVFKGFDPTASPFCQ

SEQ ID NO: 15906 - protein, 1189 aa, Homo Sapiens
MTDSEHAGHDREDGELEDGEIDDAGFEEIQEKEAKENEKQKSEKAYRKSRKKHKKEREKKKSKRRKREKHKHNSPSSDDSSDYSLDSDVEHTESSHKKRTGFYRDYDIPFTQRGHISGSYITSKKGQHNKKFKSKEYDEYSTYSDDNFGNYSDDNFGNYGQETEEDFANQLKQYRQAKETSNIALGSSFSKESGKKQRMKGVQQGIEQRVKSFNVGRGRGLPKKIKRKERGGRTNKGPNVFSVSDDFQEYNKPGKKWKVMTQEFINQHTVEHKGKQICKYFLEGRCIKGDQCKFDHDAELEKRKEICKFYLQGYCTKGENCIYMHNEFPCKFYHSGAKCYQGDNCKFSHDDLTKETKKLLDKVLNTDEELINEDERELEELRKRGITPLPKPPPGVGLLPTPPEHFPFSDPEDDFQTDFSDDFRKIPSLFEIVVKPTVDLAHKIGRKPPAFYTSASPPGPQFQGSSPHPQHIYSSGSSPGPGPNMSQGHSSPVMHPGSPGHHPCAGPPGLPVPQSPPLPPGPPEIVGPQNQAGVLVQPDTSLTPPSMGGAYHSPGFPGHVMKVPRENHCSPGSSYQQSPGEMQLNTNYESLQNPAEFYDNYYAQHSIHNFQPPNNSGDGMWHGEFAQQQPPVVQDSPNHGSGSDGSSTRTGHGPLPVPGLLPAVQRALFVRLTQRYQEDEEQTSTQPHRAPSKEEDDTVNWYSSSEEEEGSSVKSILKTLQKQTETLRNQQQPSTELSTPTDPRLAKEKSKGNQVVDPRLRTIPRQDIRKPSESAPLDLRLAWDPRKLRGNGSGHIGSSVGGAKFDLHHANAGTNVKHKRGDDDDEDTERELREKAFLIPLDASPGIMLQDPRSQLRQFSHIKMDITLTKPNFAKHIVWAPEDLLPVPLPKPDPVSSINLPLPPLIADQRLNRLWNTKSDLHQNTVSIDPKLAAKAKINTTNREGYLEQFGDSHGSGAKLGDPRLQKNFDPRLHRLPNTESHQVVMKDSHASKGAPHLPRSNPGSSQPSGAGTSNSGSGALPPYAPKLSSSAGLPLGTSTSVLSGISLYDPRDHGSSSTSELATASSGENSKNQKKSGGLKSSDKTEPSPGEAILPQKPSPNVGVTLEGPADPQADVPRSSGKVQVPAVHSLPVQALTGLIRPQYSDPRQARQPGQGSPTPDNDPGRETDDKSLKEVFKTFDPTASPFC

SEQ ID NO: 15907 - protein, 971 aa, Homo Sapiens
MSNVSEERRKRQQNIKEGLQFIQSPLSYPGTQEQYAVYLRALVRNLFNEGNDVYREHDWNNSISQYTEALNIADYAKSEEILIPKEIIEKLYINRIACYSNMGFHDKVLEDCNIVLSLNASNCKALYRKSKALSDLGRYKKAYDAVAKCSLAVPQDEHVIKLTQELAQKLGFKIRKAYVRAELSLKSVPGDGATKALNHSVEDIEPDLLTPRQEAVPVVSLPAPSFSHEVGSELASVPVMPLTSILPLQVEESALPSAVLANGGKMPFTMPEAFLDDGDMVLGDELDDLLDSAPETNETVMPSALVRGPLQTASVSPSMPFSASLLGTLPIGARYAPPPSFSEFYPPLTSSLEDFCSSLNSFSMSESKRDLSTSTSREGTPLNNSNSSLLLMNGPGSLFASENFLGISSQPRNDFGNFFGSAVTKPSSSVTPRHPLEGTHELRQACQICFVKSGPKLMDFTYHANIDHKCKKDILIGRIKNVEDKSWKKIRPRPTKTNYEGPYYICKDVAAEEECRYSGHCTFAYCQEEIDVWTLERKGAFSREAFFGGNGKINLTVFKLLQEHLGEFIFLCEKCFDHKPRMISKRNKDNSTACSHPVTKHEFEDNKCLVHILRETTVKYSKIRSFHGQCQLDLCRHEVRYGCLREDECFYAHSLVELKVWIMQNETGISHDAIAQESKRYWQNLEANVPGAQVLGNQIMPGFLNMKIKFVCAQCLRNGQVIEPDKNRKYCSAKARHSWTKDRRAMRVMSIERKKWMNIRPLPTKKQMPLQFDLCNHIASGKKCQYVGNCSFAHSPEEREVWTYMKENGIQDMEQFYELWLKSQKNEKSEDIASQSNKENGKQIHMPTDYAEVTVDFHCWMCGKNCNSEKQWQGHISSEKHKEKVFHTEDDQYCWQHRFPTGYFSICDRYMNGTCPEGNSCKFAHGNAELHEWEERRDALKMKLNKARKDHLIGPNDNDFGKYSFLFKDLN

SEQ ID NO: 15908 - protein, 993 aa, Homo Sapiens
MERQKRKADIEKGLQFIQSTLPLKQEEYEAFLLKLVQNLFAEGNDLFREKDYKQALVQYMEGLNVADYAASDQVALPRELLCKLHVNRAACYFTMGLYEKALEDSEKALGLDSESIRALFRKARALNELGRHKEAYECSSRCSLALPHDESVTQLGQELAQKLGLRVRKAYKRPQELETFSLLSNGTAAGVADQGTSNGLGSIDDIETGNVPDTREQVEIGAPRDCYVDPRGSPALLPSTPTMPLFPHVLDLLAPLDSSRTLPSTDSLDDFSDGDVFGPELDTLLDSLSLVQGGLSGSGVPSELPQLIPVFPGGTPLLPPVVGGSIPVSSPLPPASFGLVMDPSKKLAASVLDALDPPGPTLDPLDLLPYSETRLDALDSFGSTRGSLDKPDSFMEETNSQDHRPPSGAQKPAPSPEPCMPNTALLIKNPLAATHEFKQACQLCYPKTGPRAGDYTYREGLEHKCKRDILLGRLRSSEDQTWKRIRPRPTKTSFVGSYYLCKDMINKQDCKYGDNCTFAYHQEEIDVWTEERKGTLNRDLLFDPLGGVKRGSLTIAKLLKEHQGIFTFLCEICFDSKPRIISKGTKDSPSVCSNLAAKHSFYNNKCLVHIVRSTSLKYSKIRQFQEHFQFDVCRHEVRYGCLREDSCHFAHSFIELKVWLLQQYSGMTHEDIVQESKKYWQQMEAHAGKASSSMGAPRTHGPSTFDLQMKFVCGQCWRNGQVVEPDKDLKYCSAKARHCWTKERRVLLVMSKAKRKWVSVRPLPSIRNFPQQYDLCIHAQNGRKCQYVGNCSFAHSPEERDMWTFMKENKILDMQQTYDMWLKKHNPGKPGEGTPISSREGEKQIQMPTDYADIMMGYHCWLCGKNSNSKKQWQQHIQSEKHKEKVFTSDSDASGWAFRFPMGEFRLCDRLQKGKACPDGDKCRCAHGQEELNEWLDRREVLKQKLAKARKDMLLCPRDDDFGKYNFLLQEDGDLAGATPEAPAAAATATTGE

SEQ ID NO: 15909 - protein, 291 aa, Homo Sapiens [sequence omitted]

SEQ ID NO: 15910 - protein, 1644 aa, Homo Sapiens
MEESKTLKSENHEPKKNVICEESKAVQVIGNQTLKARNDKSVKEIENSSPNRNSSKKNKQNDICIEKTEVKSCKVNAANLPGPKDLGLVLRDQSHCKAKKFPNSPVKAEKATISQAKSEKATSLQAKAEKSPKSPNSVKAEKASSYQMKSEKVPSSPAEAEKGPSLLLKDMRQKTELQQIGKKIPSSFTSVDKVNIEAVGGEKCALQNSPRSQKQQTCTDNTGDSDDSASGIEDVSDDLSKMKNDESNKENSSEMDYLENATVIDESALTPEQRLGLKQAEERLERDHIFRLEKRSPEYTNCRYLCKLCLIHIENIQGAHKHIKEKRHKKNILEKQEESELRSLPPPSPAHLAALSVAVIELAKEHGITDDDLRVRQEIVEEMSKVITTFLPECSLRLYGSSLTRFALKSSDVNIDIKFPPKMNHPDLLIKVLGILKKNVLYVDVESDFHAKVPVVVCRDRKSGLLCRVSAGNDMACLTTDLLTALGKIEPVFIPLVLAFRYWAKLCYIDSQTDGGIPSYCFALMVMFFLQQRKPPLLPCLLGSWIEGFDPKRMDDFQLKGIVEEKFVKWECNSSSATEKNSIAEENKAKADQPKDDTKKTETDNQSNAMKEKHGKSPLALETPNRVSLGQLWLELLKFYTLDFALEEYVICVRIQDILTRENKNWPKRRIAIEDPFSVKRNVARSLNSQLVYEYVVERFRAAYRYFACPQTKGGNKSTVDFKKREKGKISNKKPVKSNNMATNGCILLGETTEKINAEREQPVQCDEMDCTSQRCIIDNNNLLVNELDFADHGQDSSSLSTSKSSEIEPKLDKKQDDLAPSETCLKKELSQCNCIDLSKSPDPDKSTGTDCRSNLETESSHQSVCTDTSATSCNCKATEDASDLNDDDNLPTQELYYVFDKFILTSGKPPTIVCSICKKDGHSKNDCPEDFRKIDLKPLPPMTNRFREILDLVCKRCFDELSPPCSEQHNREQILIGLEKFIQKEYDEKARLCLFGSSKNGFGFRDSDLDICMTLEGHENAEKLNCKEIIENLAKILKRHPGLRNILPITTAKVPIVKFEHRRSGLEGDISLYNTLAQHNTRMLATYAAIDPRVQYLGYTMKVFAKRCDIGDASRGSLSSYAYILMVLYFLQQRKPPVIPVLQEIFDGKQIPQRMVDGWNAFFFDKTEELKKRLPSLGKNTESLGELWLGLLRFYTEEFDFKEYVISIRQKKLLTTFEKQWTSKCIAIEDPFDLNHNLGAGVSRKMTNFIMKAFINGRKLFGTPFYPLIGREAEYFFDSRVLTDGELAPNDRCCRVCGKIGHYMKDCPKRKSLLFRLKKKDSEEEKEGNEEEKDSRDVLDPRDLHDTRDFRDPRDLRCFICGDAGHVRRECPEVKLARQRNSSVAAAQLVRNLVNAQQVAGSAQQQGDQSIRTRQSSECSESPSYSPQPQPFPQNSSQSAAITQPSSQPGSQPKLGPPQQGAQPPHQVQMPLYNFPQSPPAQYSPMHNMGLLPMHPLQIPAPSWPIHGPVIHSAPGSAPSNIGLNDPSIIFAQPAARPVAIPNTSHDGHWPRTVAPNSLVNSGAVGNSEPGFRGLTPPIPWEHAPRPHFPLVPASWPYGLHQNFMHQGNARFQPNKPFYTQDRCATRRCRERCPHPPRGNVSE

SEQ ID NO: 15911 - protein, 1495 aa, Homo Sapiens
MGDTAKPYFVKRTKDRGTMDDDDFRRGHPQQDYLIIDDHAKGHGSKMEKGLQKKKITPGNYGNTPRKGPCAVSSNPYAFKNPIYSQPAWMNDSHKDQSKRWLSDEHTGNSDNWREFKPGPRIPVINRQRKDSFQENEDGYRWQDTRGCRTVRRLFHKDLTSLETTSEMEAGSPENKKQRSRPRKPRKTRNEENEQDGDLEGPVIDESVLSTKELLGLQQAEERLKRDCIDRLKRRPRNYPTAKYTCRLCDVLIESIAFAHKHIKEKRHKKNIKEKQEEELLTTLPPPTPSQINAVGIAIDKVVQEFGLHNENLEQRLEIKRIMENVFQHKLPDCSLRLYGSSCSRLGFKNSDVNIDIQFPAIMSQPDVLLLVQECLKNSDSFIDVDADFHARVPVVVCREKQSGLLCKVSAGNENACLTTKHLTALGKLEPKLVPLVIAFRYWAKLCSIDRPEEGGLPPYVFALMAIFFLQQRKEPLLPVYLGSWIEGFSLSKLGNFNLQDIEKDVVIWEHTDSAAGDTGITKEEAPRETPIKRGQVSLILDVKHQPSVPVGQLWVELLRFYALEFNLADLVISIRVKELVSRELKDWPKKRIAIEDPYSVKRNVARTLNSQPVFEYILHCLRTTYKYFALPHKITKSSLLKPLNAITCISEHSKEVINHHPDVQTKDDKLKNSVLAQGPGATSSAANTCKVQPLTLKETAESFGSPPKEEMGNEHISVHPENSDCIQADVNSDDYKGDKVYHPETGRKNEKEKVGRKGKHLLTVDQKRGEHVVCGSTRNNESESTLDLEGFQNPTAKECEGLATLDNKADLDGESTEGTEELEDSLNHFTHSVQGQTSEMIPSDEEEEDDEEEEEEEEPRLTINQREDEDGMANEDELDNTYTGSGDEDALSEEDDELGEAAKYEDVKECGKHVERALLVELNKISLKEENVCEEKNSPVDQSDFFYEFSKLIFTKGKSPTVVCSLCKREGHLKKDCPEDFKRIQLEPLPPLTPKFLNILDQVCIQCYKDFSPTIIEDQAREHIRQNLESFIRQDFPGTKLSLFGSSKNGFGFKQSDLDVCMTINGLETAEGLDCVRTIEELARVLRKHSGLRNILPITTAKVPIVKFFHLRSGLEVDISLYNTLALHNTRLLSAYSAIDPRVKYLCYTMKVFTKMCDIGDASRGSLSSYAYTLMVLYFLQQRNPPVIPVLQEIYKGEKKPEIFVDGWNIYFFDQIDELPTYWSECGKNTESVGQLWLGLLRFYTEEFDFKEHVISIRRKSLLTTFKKQWTSKYIVIEDPFDLNHNLGAGLSRKMTNFIMKAFINGRRVFGIPVKGFPKDYPSKMEYFFDPDVLTEGELAPNDRCCRICGKIGHFMKDCPMRRKVRRRRDQEDALNQRYPENKEKRSKEDKEIHNKYTEREVSTKEDKPIQCTPQKAKPMRAAADLGREKILRPPVEKWKRQDDKDLREKRCFICGREGHIKKECPQFKGSSGSLSSKYMTQGKASAKRTQQES

SEQ ID NO: 15912 - protein, 1124 aa, Homo Sapiens
MADGPRCKRRKQANPRRNNVTNYNTVVETNSDSDDEDKLHIVEEESVTDAADCEGVPEDDLPTDQTVLPGRSSEREGNAKNCWEDDRKEGQEILGPEAQADEAGCTVKDDECESDAENEQNHDPNVEEFLQQQDTAVIFPEAPEEDQRQGTPEASGHDENGTPDAFSQLLTCPYCDRGYKRFTSLKEHIKYRHEKNEDNFSCSLCSYTFAYRTQLERHMTSHKSGRDQRHVTQSGCNRKFKCTECGKAFKYKHHLKEHLRIHSGEKPYECPNCKKRFSHSGSYSSHISSKKCISLIPVNGRPRTGLKTSQCSSPSLSASPGSPTRPQIRQKIENKPLQEQLSVNQIKTEPVDYEFKPIVVASGINCSTPLQNGVFTGGGPLQATSSPQGMVQAVVLPTVGLVSPISINLSDIQNVLKVAVDGNVIRQVLENNQANLASKEQETINASPIQQGGHSVISAISLPLVDQDGTTKIIINYSLEQPSQLQVVPQNLKKENPVATNSCKSEKLPEDLTVKSEKDKSFEGGVNDSTCLLCDDCPGDINALPELKHYDLKQPTQPPPLPAAEAEKPESSVSSATGDGNLSPSQPPLKNLLSLLKAYYALNAQPSAEELSKIADSVNLPLDVVKKWFEKMQAGQISVQSSEPSSPEPGKVNIPAKNNDQPQSANANEPQDSTVNLQSPLKMTNSPVLPVGSTTNGSRSSTPSPSPLNLSSSRNTQGYLYTAEGAQEEPQVEPLDLSLPKQQGELLERSTITSVYQNSVYSVQEEPLNLSCAKKEPQKDSCVTDSEPVVNVIPPSANPINIAIPTVTAQLPTIVAIADQNSVPCLRALAANKQTILIPQVAYTYSTTVSPAVQEPPLKVIQPNGNQDERQDTSSEGVSNVEDQNDSDSTPPKKKMRKTENGMYACDLCDKIFQKSSSLLRHKYEHTGKRPHECGICKKAFKHKHHLIEHMRLHSGEKPYQCDKCGKRFSHSGSYSQHMNHRYSYCKREAEERDSTEQEEAGPEILSNEHVGARASPSQGDSDERESLTREEDEDSEKEEEEEDKEMEELQEEKECEKPQGDEEEEEEEEEVEEEEVEEAENEGEEAKTEGLMKDDRAESQASSLGQKVGESSEQVSEEKTNEA

SEQ ID NO: 15913 - protein, 1214 aa, Homo Sapiens
MKQPIMADGPRCKRRKQANPRRKNVVNYDNVVDTGSETDEEDKLHIAEDDGIANPLDQETSPASVPNHESSPHVSQALLPREEEEDEIREGGVEHPWHNNEILQASVDGPEEMKEDYDTMGPEATIQTAINNGTVKNANCTSDFEEYFAKRKLEERDGHAVSIEEYLQRSDTAIIYPEAPEELSRLGTPEANGQEENDLPPGTPDAFAQLLTCPYCDRGYKRLTSLKEHIKYRHEKNEENFSCPLCSYTFAYRTQLERHMVTHKPGTDQHQMLTQGAGNRKFKCTECGKAFKYKHHLKEHLRIHSGEKPYECPNCKKRFSHSGSYSSHISSKKCIGLISVNGRMRNNIKTGSSPNSVSSSPTNSAITQLRNKLENGKPLSMSEQTGLLKIKTEPLDFNDYKVLMATHGFSGTSPFMNGGLGATSPLGVHPSAQSPMQHLGVGMEAPLLGFPTMNSNLSEVQKVLQIVDNTVSRQKMDCKAEEISKLKGYHMKDPCSQPEEQGVTSPNIPPVGLPVVSHNGATKSIIDYTLEKVNEAKACLQSLTTDSRRQISNIKKEKLRTLIDLVTDDKMIENHNISTPFSCQFCKESFPGPIPLHQHERYLCKMNEEIKAVLQPHENIVPNKAGVFVDNKALLLSSVLSEKGMTSPINPYKDHMSVLKAYYAMNMEPNSDELLKISIAVGLPQEFVKEWFEQRKVYQYSNSRSPSLERSSKPLAPNSNPPTKDSLLPRSPVKPMDSITSPSIAELHNSVTNCDPPLRLTKPSHFTNIKPVEKLDHSRSNTPSPLNLSSTSSKNSHSSSYTPNSFSSEELQAEPLDLSLPKQMKEPKSIIATKNKTKASSISLDHNSVSSSSENSDEPLNLTFIKKEFSNSNNLDNKSTNPVFSMNPFSAKPLYTALPPQSAFPPATFMPPVQTSIPGLRPYPGLDQMSFLPHMAYTYPTGAATFADMQQRRKYQRKQGFQGELLDGAQDYMSGLDDMTDSDSCLSRKKIKKTESGMYACDLCDKTFQKSSSLLRHKYEHTGKRPHQCQICKKAFKHKHHLIEHSRLHSGEKPYQCDKCGKRFSHSGSYSQHMNHRYSYCKREAEEREAAEREAREKGHLEPTELLMNRAYLQSITPQGYSDSEERESMPRDGESEKEHEKEGEDGYGKLGRQDGDEEFEEEEEESENKSMDTDPETIRDEEETGDHSMDDSSEDGKMETKSDHEEDNMEDGM

SEQ ID NO: 15914 - protein, 1243 aa, Homo Sapiens
METRAAENTAIFMCKCCNLFSPNQSELLSHVSEKHMEEGVNVDEIIIPLRPLSTPEPPNSSKTGDEFLVMKRKRGRPKGSTKKSSTEEELAENIVSPTEDSPLAPEEGNSLPPSSLECSKCCRKFSNTRQLRKHICIIVLNLGEEEGEAGNESDLELEKKCKEDDREKASKRPRSQKTEKVQKISGKEARQLSGAKKPIISVVLTAHEAIPGATKIVPVEAGPPETGATNSETTSADLVPRRGYQEYAIQQTPYEQPMKSSRLGPTQLKIFTCEYCNKVFKFKHSLQAHLRIHTNEKPYKCPQCSYASAIKANLNVHLRKHTGEKFACDYCSFTCLSKGHLKVHIERVHKKIKQHCRFCKKKYSDVKNLIKHIRDAHDPQDKKVKEALDELCLMTREGKRQLLYDCHICERKFKNELDRDRHMLVHGDKWPFACELCGHGATKYQALELHVRKHPFVYVCAVCRKKFVSSIRLRTHIKEVHGAAQEALVFTSSINQSFCLLEPGGDIQQEALGDQLQLVEEEFALQGVNALKEEACPGDTQLEEGRKEPEAPGEMPAPAVHLASPQAESTALPPCELETTVVSSSDLHSQEVVSDDFLLKNDTSSAEAHAAPEKPPDMQHRSSVQTQGEVITLLLSKAQSAGSDQESHGAQSPLGEGQNMAVLSAGDPDPSRCLRSNPAEASDLLPPVAGGGDTITHQPDSCKAAPEHRSGITAFMKVLNSLQKKQMNTSLCERIRKVYGDLECEYCGKLFWYQVHFDMHVRTHTREHLYYCSQCHYSSITKNCLKRHVIQKHSNILLKCPTDGCDYSTPDKYKLQAHLKVHTALDKRSYSCPVCEKSFSEDRLIKSHIKTNHPEVSMSTISEVLGRRVQLKGLIGKRAMKCPYCDFYFMKNGSDLQRHIWAHEGVKPFKCSLCEYATRSKSNLKAHMNRHSTEKTHLCDMCGKKFKSKGTLKSHKLLHTADGKQFKCTVCDYTAAQKPQLLRHMEQHVSFKPFRCAHCHYSCNISGSLKRHYNRKHPNEEYANVGTGELAAEVLIQQGGLKCPVCSFVYGTKWEFNRHLKNKHGLKVVEIDGDPKWETATEAPEEPSTQYLHITEAEEDVQGTQAAVAALQDLRYTSESGDRLDPTAVNILQQIIELGAETHDATALASVVAMAPGTVTVVKQVTEEEPSSNHTVMIQETVQQASVELAEQHHLVVSSDDVEGIETVTVYTQGGEASEFIVYVQEAMQPVEEQAVEQPAQEL

SEQ ID NO: 15915 - protein, 2572 aa, Homo Sapiens
MATLNSASTTGTTPSPGHNAPSLPSDTFSSSTPSDPVTKDPPAASSTSENMRSSEPGGQLLESGCGLVPPKEIGEPQEGPDCGHFPPNDPGVEKDKEQEEEEEGLPPMDLSNHLFFTAGGEAYLVAKLSLPGGSELLLPKGFPWGEAGIKEEPSLPFLAYPPPSHLTALHIQHGFDPIQGFSSSDQILSHDTSAPSPAACEERHGAFWSYQLAPNPPGDPKDGPMGNSGGNHVAVFWLCLLCRLGFSKPQAFMDHTQSHGVKLTPAQYQGLSGSPAVLQEGDEGCKALISFLEPKLPARPSSDIPLDNSSTVNMEANVAQTEDGPPEAEVQALILLDEEVMALSPPSPPTATWDPSPTQAKESPVAAGEAGPDWFPEGQEEDGGLCPPLNQSSPTSKEGGTLPAPVGSPEDPSDPPQPYRLADDYTPAPAAFQGLSLSSHMSLLHSRNSCKTLKCPKCNWHYKYQQTLDVHMREKHPESNSHCSYCSAGGAHPRLARGESYNCGYKPYRCDVCNYSTTTKGNLSIHMQSDKHLANLQGFQAGPGGQGSPPEASLPPSAGDKEPKTKSSWQCKVCSYETNISRNLRIHMTSEKHMQNVLMLHQGLPLGLPPGLMGPGPPPPPGATPTSPPELFQYFGPQALGQPQTPLAGPGLRPDKPLEAQLLLNGFHHVGAPARKFPTSAPGSLSPDAHLPPSQLLGSSSDSLPTSPPPDDSLSLKVFRCLVCQAFSTDSLELLLYHCSIGRSLPEAEWKEVAGDTHRCKLCCYGTQLKANFQLHLKTDKHAQKYQLAAHLREGGGAMGTPSPASLGDGAPYGSVSPLHLRCNICDFESNSKEKMQLHARGAAHEENSQIYKFLLDMEGAEAGAELGLYHCLLCAWETPSRLAVLQHLRTPAHRDAQAQRRLQLLQNGPTTEEGLAALQSILSFSHGQLRTPGKAPVTPLAEPPTPEKDAQNKTEQLASEETENKTGPSRDSANQTTVYCCPYCSFLSPESSQVRAHTLSQHAVQPKYRCPLCQEQLVGRPALHFHLSHLHNVVPECVEKLLLVATTVEMTFTTKVLSAPTLSPLDNGQEPPTHGPEPTPSRDQAAEGPNLTPEASPDPLPEPPLASVEVPDKPSGSPGQPPSPAPSPVPEPDAQAEDVAPPPTMAEEEEGTTGELRSAEPAPADSRHPLTYRKTTNFALDKFLDPARPYKCTVCKESFTQKNILLVHYNSVSHLHKMKKAAIDPSAPARGEAGAPPTTTAATDKPFKCTVCRVSYNQSSTLEIHMRSVLHQTRSRGTKTDSKIEGPERSQEEPKEGETEGEVGTEKKGPDTSGFISGLPFLSPPPPPLDLHRFPAPLFTPPVLPPFPLVPESLLKLQQQQLLLPFYLHDLKVGPKLTLAGPAPVLSLPAATPPPPPQPPKAELAEREWERPPMAKEGNEAGPSSPPDPLPNEAARTAAKALLENFGFELVIQYNEGKQAVPPPPTPPPPEALGGGDKLACGACGKLFSNMLILKTHEEHVHRRFLPFEALSRYAAQFRKSYDSLYPPLAEPPKPPDGSLDSPVPHLGPPFLVPEPEAGGTRAPEERSRAGGHWPIEEEESSRGNLPPLVPAGRRFSRTKFTEFQTQALQSFFETSAYPKDGEVERLASLLGLASRVVVVWFQNARQKARKNACEGGSMPTGGGTGGASGCRRCHATFSCVFELVRHLKKCYDDQTLEEEEEEAERGEEEEEVEEEEVEEEQGLEPPAGPEGPLPEPPDGEELSQAEATKAGGKEPEEKATPSPSPAHTCDQCAISFSSQDLLTSHRRLHFLPSLQPSAPPQLLDLPLLVFGERNPLVAATSPMPGPPLKRKHEDGSLSPTGSEAGGGGEGEPPRDKRLRTTILPEQLEILYRWYMQDSNPTRKMLDCISEEVGLKKRVVQVWFQNTRARERKGQFRSTPGGVPSPAVKPPATATPASLPKFNLLLGKVDDGTGREAPKREAPAFPYPTATLASGPQPFLPPGKEATTPTPEPPLPLLPPPPPSEEEGPEEPPKASPESEACSLSAGDLSDSSASSLAEPESPGAGGTSGGPGGGTGVPDGMGQRRYRTQMSSLQLKIMKACYEAYRTPTMQECEVLGEEIGLPKRVIQVWFQNARAKEKKAKLQGTAAGSTGGSSEGLLAAQRTDCPYCDVKYDFYVSCRGHLFSRQHLAKLKEAVRAQLKSESKCYDLAPAPEAPPALKAPPATTPASMPLGAAPTLPRLAPVLLSGPALAQPPLGNLAPFNSGPAASSGLLGLATSVLPTTTVVQTAGPGRPLPQRPMPDQTNTSTAGTTDPVPGPPTEPLGDKVSSERKPVAGPTSSSNDALKNLKALKTTVPALLGGQFLPFPLPPAGGTAPPAVFGPQLQGAYFQQLYGMKKGLFPMNPMIPQTLIGLLPNALLQPPPQPPEPTATAPPKPPELPAPGEGEAGEVDELLTGSTGISTVDVTHRYLCRQCKMAFDGEAPATAHQRSFCFFGRGSGGSMPPPLRVPICTYHCLACEVLLSGREALASHLRSSAHRRKAAPPQGGPPISITNAATAASAAVAFAKEEARLPHTDSNPKTTTTSTLLAL

SEQ ID NO: 15916 - protein, 3703 aa, Homo Sapiens
MEGCDSPVVSGKDNGCGIPQHQQWTELNSTHLPDKPSSMEQSTGESHGPLDSLRAPFNERLAESTASAGPPSEPASKEVTCNECSASFASLQTYMEHHCPSARPPPPLREESASDTGEEGDEESDVENLAGEIVYQPDGSAYIVESLSQLTQGGGACGSGSGSGPLPSLFLNSLPGAGGKQGDPSCAAPVYPQIINTFHIASSFGKWFEGPDQAFPNTSALAGLSPVLHSFRVFDVRHKSNKDYLNSDGSAKSSCVSKDVPNNVDLSKFDGFVLYGKRKPILMCFLCKLSFGYVRSFVTHAVHDHRMTLSEDERKILSNKNISAIIQGIGKDKEPLVSFLEPKNKNFQHPLVSTANLIGPGHSFYGKFSGIRMEGEEALPAGSAAGPEQPQAGLLTPSTLLNLGGLTSSVLKTPITSVPLGPLASSPTKSSEGKDSGAAEGEKQEVGDGDCFSEKVEPAEEEAEEEEEEEEAEEEEEEEEEEEEEEEDEGCKGLFPSELDEELEDRPHEEPGAAAGSSSKKDLALSNQSISNSPLMPNVLQTLSRGTASTSSNSASSFVVFDGANRRNRLSFNSEGVRANVAEGGRRLDFADESANKDNATAPEPNESTEGDDGGFVPHHQHAGSLCELGVGECPSGSGVECPKCDTVLGSSRSLGGHMTMMHSRNSCKTLKCPKCNWHYKYQQTLEAHMKEKHPEPGGSCVYCKSGQPHPRLARGESYTCGYKPFRCEVCNYSTTTKGNLSIHMQSDKHLNNMQNLQNGGGEQVFSHTAGAAAAAVAAAAAAANISSSCGAPSPTKPKTKPTWRCEVCDYETNVARNLRIHMTSEKHMHNMMLLQQNMTQIQHNRHLGLGSLPSPAEAELYQYYLAQNMNLPNLKMDSAASDAQFMMSGFQLDPAGPMAAMTPALVGGEIPLDMRLGGGQLVSEELMNLGESFIQTNDPSLKLFQCAVCNKFTTDNLDMLGLHMNVERSLSEDEWKAVMGDSYQCKLCRYNTQLKANFQLHCKTDKHVQKYQLVAHIKEGGKANEWRLKCVAIGNPVHLKCNACDYYTNSLEKLRLHTVNSRHEASLKLYKHLQQHESGVEGESCYYHCVLCNYSTKAKLNLIQHVRSMKHQRSESLRKLQRLQKGLPEEDEDLGQIFTIRRCPSTDPEEAIEDVEGPSETAADPEELAKDQEGGASSSQAEKELTDSPATSKRISFPGSSESPLSSKRPKTAEEIKPEQMYQCPYCKYSNADVNRLRVHAMTQHSVQPMLRCPLCQDMLNNKIHLQLHLTHLHSVAPDCVEKLIMTVTTPEMVMPSSMFLPAAVPDRDGNSNLEEAGKQPETSEDLGKNILPSASTEQSGDLKPSPADPGSVREDSGFICWKKGCNQVFKTSAALQTHFNEVHAKRPQLPVSDRHVYKYRCNQCSLAFKTIEKLQLHSQYHVIRAATMCCLCQRSFRTFQALKKHLETSHLELSEADIQQLYGGLLANGDLLAMGDPTLAEDHTIIVEEDKEEESDLEDKQSPTGSDSGSVQEDSGSEPKRALPFRKGPNFTMEKFLDPSRPYKCTVCKESFTQKNILLVHYNSVSHLHKLKRALQESATGQPEPTSSPDNKPFKCNTCNVAYSQSSTLEIHMRSVLHQTKARAAKLEAASGSSNGTGNSSSISLSSSTPSPVSTSGSNTFTTSNPSSAGIAPSSNLLSQVPTESVGMPPLGNPIGANIASPSEPKEANRKKLADMIASRQQQQQQQQQQQQQQQQQQQAQTLAQAQAQVQAHLQQELQQQAALIQSQLFNPTLLPHFPMTTETLLQLQQQQHLLFPFYIPSAEFQLNPEVSLPVTSGALTLTGTGPGLLEDLKAQVQVPQQSHQQILPQQQQNQLSIAQSHSALLQPSQHPEKKNKLVIKEKEKESQRERDSAEGGEGNTGPKETLPDALKAKEKKELAPGGGSEPSMLPPRIASDARGNATKALLENFGFELVIQYNENKQKVQKKNGKTDQGENLEKLECDSCGKLFSNILILKSHQEHVHQNYFPFKQLERFAKQYRDHYDKLYPLRPQTPEPPPPPPPPPPPPLPAAPPQPASTPAIPASAPPITSPTIAPAQPSVPLTQLSMPMELPIFSPLMMQTMPLQTLPAQLPPQLGPVEPLPADLAQLYQHQLNPTLLQQQNKRPRTRITDDQLRVLRQYFDINNSPSEEQIKEMADKSGLPQKVIKHWFRNTLFKERQRNKDSPYNFSNPPITSLEELKIDSRPPSPEPPKQEYWGSKRSSRTRFTDYQLRVLQDFFDANAYPKDDEFEQLSNLLNLPTRVIVVWFQNARQKARKNYENQGEGKDGERRELTNDRYIRTSNLNYQCKKCSLVFQRIFDLIKHQKKLCYKDEDEEGQDDSQNEDSMDAMEILTPTSSSCSTPMPSQAYSAPAPSANNTASSAFLQLTAEAEELATFNSKTEAGDEKPKLAEAPSAQPNQTQEKQGQPKPELQQQEQPEQKTNTPQQKLPQLVSLPSLPQPPPQAPPPQCPLPQSSPSPSQLSHLPLKPLHTSTPQQLANLPPQLIPYQCDQCKLAFPSFEHWQEHQQLHFLSAQNQFIHPQFLDRSLDMPFMLFDPSNPLLASQLLSGAIPQIPASSATSPSTPTSTMNTLKRKLEEKASASPGENDSGTGGEEPQRDKRLRTTITPEQLEILYQKYLLDSNPTRKMLDHIAHEVGLKKRVVQVWFQNTRARERKGQFRAVGPAQAHRRCPFCRALFKAKTALEAHIRSRHWHEAKRAGYNLTLSAMLLDCDGGLQMKGDIFDGTSFSHLPPSSSDGQGVPLSPVSKTMELSPRTLLSPSSIKVEGIEDFESPSMSSVNLNFDQTKLDNDDCSSVNTAITDTTTGDEGNADNDSATGIATETKSSSAPNEGLTKAAMMAMSEYEDRLSSGLVSPAPSFYSKEYDNEGTVDYSETSSLADPCSPSPGASGSAGKSGDSGDRPGQKRFRTQMTNLQLKVLKSCFNDYRTPTMLECEVLGNDIGLPKRVVQVWFQNARAKEKKSKLSMAKHFGINQTSYEGPKTECTLCGIKYSARLSVRDHIFSQQHISKVKDTIGSQLDKEKEYFDPATVRQLMAQQELDRIKKANEVLGLAAQQQGMFDNTPLQALNLPTAYPALQGIPPVLLPGLNSPSLPGFTPSNTALTSPKPNLMGLPSTTVPSPGLPTSGLPNKPSSASLSSPTPAQATMAMGPQQPPQQQQQQQQPQVQQPPPPPAAQPPPTPQLPLQQQQQRKDKDSEKVKEKEKAHKGKGEPLPVPKKEKGEAPTATAATISAPLPTMEYAVDPAQLQALQAALTSDPTALLTSQFLPYFVPGFSPYYAPQIPGALQSGYLQPMYGMEGLFPYSPALSQALMGLSPGSLLQQYQQYQQSLQEAIQQQQQRQLQQQQQQKVQQQQPKASQTPVPPGAPSPDKDPAKESPKPEEQKNTPREVSPLLPKLPEEPEAESKSADSLYDPFIVPKVQYKLVCRKCQAGFSDEEAARSHLKSLCFFGQSVVNLQEMVLHVPTGGGGGGSGGGGGGGGGGGGGGSYHCLACESALCGEEALSQHLESALHKHRTITRAARNAKEHPSLLPHSACFPDPSTASTSQSAAHSNDSPPPPSAAAPSSASPHASRKSWPQVVSRASAAKPPSFPPLSSSSTVTSSSCSTSGVQPSMPTDDYSEESDTDLSQKSDGPASPVEGPKDPSCPKDSGLTSVGTDTFRL

SEQ ID NO: 15917 - protein, 3567 aa, Homo Sapiens
METCDSPPISRQENGQSTSKLCGTTQLDNEVPEKVAGMEPDRENSSTDDNLKTDERKSEALLGFSVENAAATQVTSAKEIPCNECATSFPSLQKYMEHHCPNARLPVLKDDNESEISELEDSDVENLTGEIVYQPDGSAYIIEDSKESGQNAQTGANSKLFSTAMFLDSLASAGEKSDQSASAPMSFYPQIINTFHIASSLGKPFTADQAFPNTSALAGVGPVLHSFRVYDLRHKREKDYLTSDGSAKNSCVSKDVPNNVDLSKFDGCVSDGKRKPVLMCFLCKLSFGYIRSFVTHAVHDHRMTLNDEEQKLLSNKCVSAIIQGIGKDKEPLISFLEPKKSTSVYPHFSTTNLIGPDPTFRGLWSAFHVENGDSLPAGFAFLKGSASTSSSAEQPLGITQMPKAEVNLGGLSSLVVNTPITSVSLSHSSSESSKMSESKDQENNCERPKESNVLHPNGECPVKSEPTEPGDEDEEDAYSNELDDEEVLGELTDSIGNKDFPLLNQSISPLSSSVLKFIEKGTSSSSATVSDDTEKKKQTAAVRASGSVASNYGISGKDFADASASKDSATAAHPSEIARGDEDSSATPHQHGFTPSTPGTPGPGGDGSPGSGIECPKCDTVLGSSRSLGGHMTMMHSRNSCKTLKCPKCNWHYKYQQTLEAHMKEKHPEPGGSCVYCKTGQPHPRLARGESYTCGYKPFRCEVCNYSTTTKGNLSIHMQSDKHLNNVQNLQNGNGEQVFGHSAPAPNTSLSGCGTPSPSKPKQKPTWRCEVCDYETNVARNLRIHMTSEKHMHNMMLLQQNMKQIQHNLHLGLAPAEAELYQYYLAQNIGLTGMKLENPADPQLMINPFQLDPATAAALAPGLGELSPYISDPALKLFQCAVCNKFTSDSLEALSVHVSSERSLPEEEWRAVIGDIYQCKLCNYNTQLKANFQLHCKTDKHMQKYQLVAHIKEGGKSNEWRLKCIAIGNPVHLKCNACDYYTNSVDKLRLHTTNHRHEAALKLYKHLQKQEGAVNPESCYYYCAVCDYTTKVKLNLVQHVRSVKHQQTEGLRKLQLHQQGLAPEEDNLSEIFFVKDCPPNELETASLGARTCDDDLTEQHEEAEGAIKPTAVAEDDEKDTSERDNSEGKNSNKDSVSVAGGTQPLLLAKEEDVATKRSKPTEDNKFCHEQFYQCPYCNYNSRDQSRIQMHVLSQHSVQPVICCPLCQDVLSNKMHLQLHLTHLHSVSPDCVEKLLMTVPVPDVMMPNSMLLPAAASEKSERDTPAAVTAEGSGKYSGESPMDDKSMAGLEDSKANVEVKNEEQKPTKEPLEVSEWNKNSSKDVKIPDTLQDQLNEQQKRQPLSVSDRHVYKYRCNHCSLAFKTMQKLQIHSQYHAIRAATMCNLCQRSFRTFQALKKHLEAGHPELSEAELQQLYASLPVNGELWAESETMSQDDHGLEQEMEREYEVDHEGKASPVGSDSSSIPDDMGSEPKRTLPFRKGPNFTMEKFLDPSRPYKCTVCKESFTQKNILLVHYNSVSHLHKLKKVLQEASSPVPQETNSNTDNKPYKCSICNVAYSQSSTLEIHMRSVLHQTKARAAKLEPSGHVAGGHSIAANVNSPGQGMLDSMSLAAVNSKDTHLDAKELNKKQTPDLISAQPAHHPPQSPAQIQMQLQHELQQQAAFFQPQFLNPAFLPHFPMTPEALLQFQQPQFLFPFYIPGTEFSLGPDLGLPGSATFGMPGMTGMAGSLLEDLKQQIQTQHHVGQTQLQILQQQAQQYQATQPQLQPQKQQQQPPPPQQQQQQQASKLLKQEQSNIVSADCQIMKDVPSYKEAEDISEKPEKPKQEFISEGEGLKEGKDTKKQKSLEPSIPPPRIASGARGNAAKALLENFGFELVIQYNENRQKVQKKGKSGEGENTDKLECGTCGKLFSNVLILKSHQEHVHGQFFPYAALEKFARQYREAYDKLYPISPSSPETPPPPPPPPPLPPAPPQPSSMGPVKIPNTVSTPLQAPPPTPPPPPPPPPPPPPPPPPPPPSAPPQVQLPVSLDLPLFPSIMMQPVQHPALPPQLALQLPQMDALSADLTQLCQQQLGLDPNFLRHSQFKRPRTRITDDQLKILRAYFDINNSPSEEQIQEMAEKSGLSQKVIKHWFRNTLFKERQRNKDSPYNFSNPPITVLEDIRIDPQPTSLEHYKSDASFSKRSSRTRFTDYQLRVLQDFFDTNAYPKDDEIEQLSTVLNLPTRVIVVWFQNARQKARKSYENQAETKDNEKRELTNERYIRTSNMQYQCKKCNVVFPRIFDLITHQKKQCYKDEDDDAQDESQTEDSMDATDQVVYKHCTVSGQTDAAKNAAAPAASSGSGTSTPLIPSPKPEPEKTSPKPEYPAEKPKQSDPSPPSQGTKPALPLASTSSDPPQASTAQPQPQPQPPKQPQLIGRPPSASQTPVPSSPLQISMTSLQNSLPPQLLQYQCDQCTVAFPTLELWQEHQHMHFLAAQNQFLHSPFLERPMDMPYMIFDPNNPLMTGQLLGSSLTQMPPQASSSHTTAPTTVAASLKRKLDDKEDNNCSEKEGGNSGEDQHRDKRLRTTITPEQLEILYEKYLLDSNPTRKMLDHIAREVGLKKRVVQVWFQNTRARERKGQFRAVGPAQSHKRCPFCRALFKAKSALESHIRSRHWNEGKQAGYSLPPSPLISTEDGGESPQKYIYFDYPSLPLTKIDLSSENELASTVSTPVSKTAELSPKNLLSPSSFKAECSEDVENLNAPPAEAGYDQNKTDFDETSSINTAISDATTGDEGNTEMESTTGSSGDVKPALSPKEPKTLDTLPKPATTPTTEVCDDKFLFSLTSPSIHFNDKDGDHDQSFYITDDPDDNADRSETSSIADPSSPNPFGSSNPFKSKSNDRPGHKRFRTQMSNLQLKVLKACFSDYRTPTMQECEMLGNEIGLPKRVVQVWFQNARAKEKKFKINIGKPFMINQGGTEGTKPECTLCGVKYSARLSIRDHIFSKQHISKVRETVGSQLDREKDYLAPTTVRQLMAQQELDRIKKASDVLGLTVQQPGMMDSSSLHGISLPTAYPGLPGLPPVLLPGMNGPSSLPGFPQNSNISAGMLGFPTSATSSPALSLSSAPTKPLLQTPPPPPPPPPPPPSSSLSGQQTEQQNKESEKKQTKPNKVKKIKEEELEATKPEKHPKKEEKISSALSVLGKVVGETHVDPIQLQALQNAIAGDPASFIGGQFLPYFIPGFASYFTPQLPGTVQGGYFPPVCGMESLFPYGPTMPQTLAGLSPGALLQQYQQYQQNLQESLQKQQKQQQEQQQKPVQAKTSKVESDQPQNSNDASETKEDKSTATESTKEEPQLESKSADFSDTYVVPFVKYEFICRKCQMMFTDEDAAVNHQKSFCYFGQPLIDPQETVLRVPVSKYQCLACDVAISGNEALSQHLQSSLHKEKTIKQAMRNAKEHVRLLPHSVCSPNPNTTSTSQSAASSNNTYPHLSCFSMKSWPNILFQASARRAASPPSSPPSLSLPSTVTSSLCSTSGVQTSLPTESCSDESDSELSQKLEDLDNSLEVKAKPASGLDGNFNSIRMDMFSV

SEQ ID NO: 15918 - protein, 407 aa, Homo Sapiens
MNKSQGSVSFTDVTVDFTQEEWEQLDPSQRILYMDVMLENYSNLLSVEVWKADDQMERDHRNPDEQARQFLILKNQTPIEERGDLFGKALNLNTDFVSLRQVPYKYDLYEKTLKYNSDLLNSNRSYAGKQTDECNEFGKALLYLKQEKTHSGVEYSEYNKSGKALSHKAAIFKHQKIKNLVQPFICTYCDKAFSFKSLLISHKRIHTGEKPYECNVCKKTFSHKANLIKHQRIHTGEKPFECPECGKAFTHQSNLIVHQRAHMEKKPYECSECGKTFAQKFELTTHQRIHTGERPYECNECAKTFFKKSNLIIHQKIHTGEKRYECSECGKSFIQNSQLIIHMRTHTGEKPYECTECGKTFSQRSTLRLHLRIHTGEKPYECSECGKAFSRKSRLSVHQRVHIGEKP

SEQ ID NO: 15919 - protein, 533 aa, Homo Sapiens
MAHGSVTFRDVAIDFSQEEWEFLDPAQRDLYRDVMWENYSNFISLGPSISKPDVITLLDEERKEPGMVVREGTRRYCPDLESRYRTNTLSPEKDIYEIYSFQWDIMERIKSYSLQGSIFRNDWECKSKIEGEKEQQEGYFGQVKITSEKMTTYKRHNFLTEYQIVHNGEKVYECKECRKTFIRRSTLSQHLRIHTGEKPYKCKECGQAFRQRAHLIRHHKLHTGEKPYECKECGKAFTVLQELTQHQRLHTGEKPYECKECGKAFRVHQQLARHQRIHTGEKPYECKDCGKTFRQCTHLTRHQRLHTAEKLYECKECGKAFVCGPDLRVHQKIHFGEKPYECKECGKAFRICQQLTVHQSIHTGEKPYECKECGKTFRLRQQLVRHQRIHTREKPYECMECWKTFSSYSQLISHQSIHIGERPYECEECGKAFRLLSQLTQHQSIHTGEKPYECKECRKPFRLLSQLTQHQSIHTGEKPYECKECGKAFRLYSFLTQHQRIHTGEKPYKCKECKKAFRQHSHLTQHQKIHNGI

SEQ ID NO: 15920 - protein, 461 aa, Homo Sapiens
MEREGIWHSTLGETWEPNNWLEGQQDSHLSQVGVTHKETFTEMRVCGGNEFERCSSQDSILDTQQSIPMVKRPHNCNSHGEDATQNSELIKTQRMFVGKKIYECNQCSKTFSQSSSLLKHQRIHTGEKPYKCNVCGKHFIERSSLTVHQRIHTGEKPYKCNECGKAFSQSMNLTVHQRTHTGEKPYQCKECGKAFHKNSSLIQHERIHTGEKPYKCNECGKAFTQSMNLTVHQRTHTGEKPYECNECGKAFSQSMHLIVHQRSHTGEKPYECSQCGKAFSKSSTLTLHQRNHTGEKPYKCNKCGKSFSQSTYLIEHQRLHSGVKPFECNECGKAFSKNSSLTQHRRIHTGEKPYECMVCGKHFTGRSSLTVHQVIHTGEKPYECNECGKAFSQSAYLIEHQRIHTGEKPYECDQCGKAFIKNSSLTVHQRTHTGEKPYQCNECGKAFSRSTNLTRHQRTHT

SEQ ID NO: 15921 - protein, 868 aa, Homo Sapiens
MRGAASASVREPTPLPGRGAPRTKPRAGRGPTVGTPATLALPARGRPRSRNGLASKGQRGAAPTGPGHRALPSRDTALPQERNKKLEAVGTGIEPKAMSQGLVTFGDVAVDFSQEEWEWLNPIQRNLYRKVMLENYRNLASLGLCVSKPDVISSLEQGKEPWTVKRKMTRAWCPDLKAVWKIKELPLKKDFCEGKLSQAVITERLTSYNLEYSLLGEHWDYDALFETQPGLVTIKNLAVDFRQQLHPAQKNFCKNGIWENNSDLGSAGHCVAKPDLVSLLEQEKEPWMVKRELTGSLFSGQRSVHETQELFPKQDSYAEGVTDRTSNTKLDCSSFRENWDSDYVFGRKLAVGQETQFRQEPITHNKTLSKERERTYNKSGRWFYLDDSEEKVHNRDSIKNFQKSSVVIKQTGIYAGKKLFKCNECKKTFTQSSSLTVHQRIHTGEKPYKCNECGKAFSDGSSFARHQRCHTGKKPYECIECGKAFIQNTSLIRHWRYYHTGEKPFDCIDCGKAFSDHIGLNQHRRIHTGEKPYKCDVCHKSFRYGSSLTVHQRIHTGEKPYECDVCRKAFSHHASLTQHQRVHSGEKPFKCKECGKAFRQNIHLASHLRIHTGEKPFECAECGKSFSISSQLATHQRIHTGEKPYECKVCSKAFTQKAHLAQHQKTHTGEKPYECKECGKAFSQTTHLIQHQRVHTGEKPYKCMECGKAFGDNSSCTQHQRLHTGQRPYECIECGKAFKTKSSLICHRRSHTGEKPYECSVCGKAFSHRQSLSVHQRIHSGKKPYECKECRKTFIQIGHLNQHKRVHTGERSYNYKKSRKVFRQTAHLAHHQRIHTGESSTCPSLPSTSNPVDLFPKFLWNPSSLPSP

SEQ ID NO: 15922 - protein, 502 aa, Homo Sapiens
MGTENKEVIPKEEISEESEPHGSLLEKFPKVVYQGHEFGAGCEEDMLEGHSRESMEEVIEQMSPQERDFPSGLMIFKKSPSSEKDRENNESERGCSPSPNLVTHQGDTTEGVSAFATSGQNFLEILESNKTQRSSVGEKPHTCKECGKAFNQNSHLIQHMRVHSGEKPFECKECGKTFGTNSSLRRHLRIHAGEKPFACNECGKAFIQSSHLIHHHRIHTGERPYKCEECGKAFSQNSALILHQRIHTGEKPYECNECGKTFRVSSQLIQHQRIHTEERYHECNECGKAFKHSSGLIRHQKIHTGEKPYLCNECGKGFGQSSELIRHQRIHTGDKPYECNECGKTFGQNSEIIRHIRIHTGEKPYVCKECGKAFRGNSELLRHERIHTGEKPYECFECGKAFRRTSHLIVHQRIHTGEKPHQCNECARTFWDNSELLLHQKIHIGEKPYECSECEKTFSQHSQLIIHQRIHTGEKPYECQECQKTFSRSSHLLRHQSVHCME

SEQ ID NO: 15923 - protein, 519 aa, Homo Sapiens
MARDLVMFRDVAVDFSQEEWECLNSYQRNLYRDVILENYSNLVSLAGCSISKPDVITLLEQGKEPWMVVRDEKRRWTLDLESRYDTKKLFQGKDIYEMNLSQWKVMERIKSCGLEEQESPHEVCFRQVTKTTSEKMPTYRKLTSLPLYQKSHNREKPYECGECGKAFRVRQQLTFHQRIHTGEKPYECKECGKAFRQCAHLSRHQRIHTSDKLYECKKCGKIFTCGSDLRVHQRIHIGEKPYECKECGKAFRVRGQLNLHQRIHTGEKPYECKECGKAFRQYAHLTRHQRLNIAEKCYECKECGQAFLCSTGLRLHHKLHTGEKPYECKECGKAFRVRQQLTLHQRIHTGEKPYDCKECGKTFSRGYHLTLHQRIHTGEKPYECKECQKFFRRYSELISHQGIHIGEKPYECKECGKAFRLFSQLTQHQSIHFGEKPFKCKECEKTFRLLSQLTQHQSIHTGEKPYDCKECGKAFRLHSSLIQHQRIHSGEKPYKCKECKKAFRQHSHLTYHQRIHNVT

SEQ ID NO: 15924 - protein, 338 aa, Homo Sapiens
MTTTLVSATIFDLSEVLCKGNKMLNYSAPSAGGCLLDRKAVGTPAGGGFPRRHSVTLPSSKFHQNQLLSSLKGEPAPALSSRDSRFRDRSFSEGGERLLPTQKQPGGGQVNSSRYKTELCRPFEENGACKYGDKCQFAHGIHELRSLTRHPKYKTELCRTFHTIGFCPYGPRCHFIHNAEERRALAGARDLSADRPRLQHSFSFAGFPSAAATAAATGLLDSPTSITPPPILSADDLLGSPTLPDGTNNPFAFSSQELASLFAPSMGLPGGGSPTTFLFRPMSESPHMFDSPPSPQDSLSDQEGYLSSSSSSHSGSDSPTLDNSRRLPIFSRLSISDD

SEQ ID NO: 15925 - protein, 494 aa, Homo Sapiens
MSTTLLSAFYDVDFLCKTEKSLANLNLNNMLDKKAVGTPVAAAPSSGFAPGFLRRHSASNLHALAHPAPSPGSCSPKFPGAANGSSCGSAAAGGPTSYGTLKEPSGGGGTALLNKENKFRDRSFSENGDRSQHLLHLQQQQKGGGGSQINSTRYKTELCRPFEESGTCKYGEKCQFAHGFHELRSLTRHPKYKTELCRTFHTIGFCPYGPRCHFIHNADERRPAPSGGASGDLRAFGTRDALHLGFPREPRPKLHHSLSFSGFPSGHHQPPGGLESPLLLDSPTSRTPPPPSCSSASSCSSSASSCSSASAASTPSGAPTCCASAAAAAAAALLYGTGGAEDLLAPGAPCAACSSASCANNAFAFGPELSSLITPLAIQTHNFAAVAAAAYYRSQQQQQQQGLAPPAQPPAPPSATLPAGAAAPPSPPFSFQLPRRLSDSPVFDAPPSPPDSLSDRDSYLSGSLSSGSLSGSESPSLDPGRRLPIFSRLSISDD

SEQ ID NO: 15926 - protein, 630 aa, Homo Sapiens
MSVSSGVQILTKPETVDRRRSAETTKEAGRPLEMAVSEPEASAAEWKQLDPAQSNLYNDVMLENYCNQASMGCQAPKPDMISKLEKGEAPWLGKGKRPSQGCPSKIARPKQKETDGKVQKDDDQLENIQKSQNKLLREVAVKKKTQAKKNGSDCGSLGKKNNLHKKHVPSKKRLLKFESCGKILKQNLDLPDHSRNCVKRKSDAAKEHKKSFNHSLSDTRKGKKQTGKKHEKLSSHSSSDKCNKTGKKHDKLCCHSSSHIKQDKIQTGEKHEKSPSLSSSTKHEKPQACVKPYECNQCGKVLSHKQGLIDHQRVHTGEKPYECNECGIAFSQKSHLVVHQRTHTGEKPYECIQCGKAHGHKHALTDHLRIHTGEKPYECAECGKTFRHSSNLIQHVRSHTGEKPYECKECGKSFRYNSSLTEHVRTHTGEIPYECNECGKAFKYSSSLTKHMRIHTGEKPFECNECGKAFSKKSHLIIHQRTHTKEKPYKCNECGKAFGHSSSLTYHMRTHTGESPFECNQCGKGFKQIEGLTQHQRVHTGEKPYECNECGKAFSQKSHLIVHQRTHTGEKPYECNECEKAFNAKSQLVIHQRSHTGEKPYECNECGKTFKQNASLTKHVKTHSEDKSHE

SEQ ID NO: 15927 - protein, 198 aa, Homo Sapiens
MEKPAGRKKKTPTPREEADVQKSALREEKVSGDRKPPERPTVPRKPRTEPCLSPEDEEHVFDAFDASFKDDFEGVPVFIPFQRKKPYECSECGRIFKHKTDHIRHQRVHTGEKPFKCAQCGKAFRHSSDVTKHQRTHTGEKPFKCGECGKAFNCGSNLLKHQKTHTGEKPYECTHCGKAFAYSSCLIRHQKRHPRKKP

SEQ ID NO: 15928 - protein, 310 aa, Homo Sapiens
MSQQLKKRAKTRHQKGLGGRAPSGAKPRQGKSSQDLQAEIEPVSAVWALCDGYVCYEPGPQALGGDDFSDCYIECVIRGEFSQPILEEDSLFESLEYLKKGSEQQLSQKVFEASSLECSLEYMKKGVKKELPQKIVGENSLEYSEYMTGKKLPPGGIPGIDLSDPKQLAEFARKKPPINKEYDSLSAIACPQSGCTRKLRNRAALRKHLLIHGPRDHVCAECGKAFVESSKLKRHFLVHTGEKPFRCTFEGCGKRFSLDFNLRTHVRIHTGEKRFVCPFQGCNRRFIQSNNLKAHILTHANTNKNEQEGK

SEQ ID NO: 15929 - protein, 452 aa, Homo Sapiens
MAAGEPRSLLFFQKPVTFEDVAVNFTQEEWDCLDASQRVLYQDVMSETFKNLTSVARIFLHKPELITKLEQEEEQWRETRVLQASQAGPPFFCYTCGKCFSRRSYLYSHQFVHNPKLTNSCSQCGKLFRSPKSLSYHRRMHLGERPFCCTLCDKTYCDASGLSRHRRVHLGYRPHSCSVCGKSFRDQSELKRHQKIHQNQEPVDGNQECTLRIPGTQAEFQTPIARSQRSIQGLLDVNHAPVARSQEPIFRTEGPMAQNQASVLKNQAPVTRTQAPITGTLCQDARSNSHPVKPSRLNVFCCPHCSLTFSKKSYLSRHQKAHLTEPPNYCFHCSKSFSSFSRLVRHQQTHWKQKSYLCPICDLSFGEKEGLMDHWRGYKGKDLCQSSHHKCRVILGQWLGFSHDVPTMAGEEWKHGGDQSPPRIHTPRRRGLREKACKGDKTKEAVSILKHK

SEQ ID NO: 15930 - protein, 900 aa, Homo Sapiens
MSHLKTSTEDEEPTEEYENVGNAASKWPKVEDPMPESKVGDTCVWDSKVENQQKKPVENRMKEDKSSIREAISKAKSTANIKTEQEGEASEKSLHLSPQHITHQTMPIGQRGSEQGKRVENINGTSYPSLQQKTNAVKKLHKCDECGKSFKYNSRLVQHKIMHTGEKRYECDDCGGTFRSSSSLRVHKRIHTGEKPYKCEECGKAYMSYSSLINHKSTHSGEKNCKCDECGKSFNYSSVLDQHKRIHTGEKPYECGECGKAFRNSSGLRVHKRIHTGEKPYECDICGKTFSNSSGLRVHKRIHTGEKPYECDECGKAFITCRTLLNHKSIHFGDKPYKCDECEKSFNYSSLLIQHKVIHTGEKPYECDECGKAFRNSSGLIVHKRIHTGEKPYKCDVCGKAFSYSSGLAVHKSIHPGKKAHECKECGKSFSYNSLLLQHRTIHTGERPYVCDVCGKTFRNNAGLKVHRRLHTGEKPYKCDVCGKAYISRSSLKNHKGIHLGEKPYKCSYCEKSFNYSSALEQHKRIHTREKPFGCDECGKAFRNNSGLKVHKRIHTGERPYKCEECGKAYISLSSLINHKSVHPGEKPFKCDECEKAFITYRTLTNHKKVHLGEKPYKCDVCEKSFNYTSLLSQHRRVHTREKPYECDRCEKVFRNNSSLKVHKRIHTGERPYECDVCGKAYISHSSLINHKSTHPGRTPHTCDECGKAFFSSRTLISHKRVHLGEKPFKCVECGKSFSYSSLLSQHKRIHTGEKPYVCDRCGKAFRNSSGLTVHKRIHTGEKPYECDECGKAYISHSSLINHKSVHQGKQPYNCECGKSFNYRSVLDQHKRIHTGKKPYRCNECGKAFNIRSNLTKHKRTHTGEESLNVIYVGSYSGTSQKRTYEGGNALDGGRMRMPL

SEQ ID NO: 15931 - protein, 681 aa, Homo Sapiens
MNASSEGESFAGSVQIPGGTTVLVELTPDIHICGICKQQFNNLDAFVAHKQSGCQLTGTSAAAPSTVQFVSEETVPATQTQTTTRTITSETQTITVSAPEFVFEHGYQTYLPTESNENQTATVISLPAKSRTKKPTTPPAQKRLNCCYPGCQFKTAYGMKDMERHLKIHTGDKPHKCEVCGKCFSRKDKLKTHMRCHTGVKPYKCKTCDYAAADSSSLNKHLRIHSDERPFKCQICPYASRNSSQLTVHLRSHTGDAPFQCWLCSAKFKISSDLKRHMRVHSGEKPFKCEFCNVRCTMKGNLKSHIRIKHSGNNFKCPHCDFLGDSKATLRKHSRVHQSEHPEKCSECSYSCSSKAALRIHERIHCTDRPFKCNYCSFDTKQPSNLSKHMKKFHGDMVKTEALERKDTGRQSSRQVAKLDAKKSFHCDICDASFMREDSLRSHKRQHSEYSESKNSDVTVLQFQIDPSKQPATPLTVGHLQVPLQPSQVPQFSEGRVKIIVGHQVPQANTIVQAAAAAVNIVPPALVAQNPEELPGNSRLQILRQVSLIAPPQSSRCPSEAGAMTQPAVLLTTHEQTDGATLHQTLIPTASGGPQEGSGNQTFITSSGITCTDFEGLNALIQEGTAEVTVVSDGGQNIAVATTAPPVFSSSSQQELPKQTYSIIQGAAHPALLCPADSIPD

SEQ ID NO: 15932 - protein, 645 aa, Homo Sapiens
MNASSEGESFAGSVQIPGGTTVLVELTPDIHICGICKQQFNNLDAFVAHKQSGCQLTGTSAAAPSTVQFVSEETVPATQTQTTTRTITSETQTITVSAPEFVFEHGYQTYLPTESNENQTATVISLPAKSRTKKPTTPPAQKRLNCCYPGCQFKTAYGMKDMERHLKIHTGDKPHKCEVCGKCFSRKDKLKTHMRCHTGVKPYKCKTCDYAAADSSSLNKHLRIHSDERPFKCQICPYASRNSSQLTVHLRSHTASELDDDVPKANCLSTESTDTPKAPVITLPSEAREQMATLGERTFNCCYPGCHFKTVHGMKDLDRHLRIHTGDKPHKCEFCDKCFSRKDNLTMHMRCHTSVKPHKCHLCDYAAVDSSSLKKHLRIHSDERPYKCQLCPYASRNSSQLTVHLRSHTGDTPFQCWLCSAKFKISSDLKRHMIVHSGEKPFKCEFCDVRCTMKANLKSHIRIKHTFKCLHCAFQGRDRADLLEHSRLHQADHPEKCPECSYSCSSAAALRVHSRVHCKDRPFKCDFCSFDTKRPSSLAKHVDKVHRDEAKTENRAPLGKEGLREGSSQHVAKIVTQRAFRCETCGASFVRDDSLRCHKKQHSDQSENKNSDLVTFPPESGASGQLSTLVSVGQLEAPLEPSQDL

SEQ ID NO: 15933 - protein, 526 aa, Homo Sapiens
MPQQLLITLPTEASTWVKLQHPKKAVEGAPLWEDVTKMFEGEALLSQDAEDVKTQRESLEDEVTPGLPTAESQELLTFKDISIDFTQEEWGQLAPAHQNLYREVMLENYSNLVSVGYQLSKPSVISQLEKGEEPWMAEKEGPGDPSSDLKSKIETIESTAKSTISQERLYHGIMMESFMRDDIIYSTLRKVSTYDDVLERHQETCMRDVRQAILTHKKRVQETNKFGENIIVHSNVIIEQRHHKYDTPTKRNTYKLDLINHPTSYIRTKTYECNICEKIFKQPIHLTEHMRIHTGEKPFRCKECGRAFSQSASLSTHQRIHTGEKPFECEECGKAFRHRSSLNQHHRTHTGEKPYVCDKCQKAFSQNISLVQHLRTHSGEKPFTCNECGKTFRQIRHLSEHIRIHTGEKPYACTACCKTFSHRAYLTHHQRIHTGERPYKCKECGKAFRQRIHLSNHKTVHTGVKAYECNRCGKAYRHDSSFKKHQRHHTGEKPYECNECGKAFSYNSSLSRHHEIHRRNAFRNKV

SEQ ID NO: 15934 - protein, 534 aa, Homo Sapiens
MLQQLLITLPTEASTWVKLRHPKAATERVALWEDVTKMFKAEALLSQDADETQGESLESRVTLGSLTAESQELLTFKDVSVDFTQEEWGQLAPAHRNLYREVMLENYGNLVSVGCQLSKPGVISQLEKGEEPWLMERDISGVPSSDLKSKTKTKESALQNDISWEELHCGLMMERFTKGSSMYSTLGRISKCNKLESQQENQRMGKGQIPLMCKKTFTQERGQESNRFEKRINVKSEVMPGPIGLPRKRDRKYDTPGKRSRYNIDLVNHSRSYTKMKTFECNICEKIFKQLIHLTEHMRIHTGEKPFRCKECGKAFSQSSSLIPHQRIHTGEKPYECKECGKTFRHPSSLTQHVRIHTGEKPYECRVCEKAFSQSIGLIQHLRTHVREKPFTCKDCGKAFFQIRHLRQHEIIHTGVKPYICNVCSKTFSHSTYLTQHQRTHTGERPYKCKECGKAFSQRIHLSIHQRVHTGVKPYECSHCGKAFRHDSSFAKHQRIHTGEKPYDCNECGKAFSCSSSLIRHCKTHLRNTFSNVV

SEQ ID NO: 15935 - protein, 532 aa, Homo Sapiens
MALRSVMFSDVSIDFSPEEWEYLDLEQKDLYRDVMLENYSNLVSLGCFISKPDVISSLEQGKEPWKVVRKGRRQYPDLETKYETKKLSLENDIYEINLSQWKIMERIENHGLKGLILKNDWESTGKIEGQERPQEGYFSSVKMPSEKVSSYQKRTSVTPHQRLHFVDKPYECKECGKAFRVRQQLTFHHRIHTGEKPYECKECGMAFRQTAHLTRHQRLHSGEKLYECKECGEAFICGADLRVHQKMHIGEKPYECKECGKAFRVRGQLTLHQRIHTGEKPYVCKECGKAFRQYAHLTRHQKLNSADRLYECKECGKAFLCGSGLRVHHKLHTGEKPYECKECGKAFRVRQQLTLHQRIHTGEKPYECKECGKTFSRGYHLILHHRIHTGEKPYECKECWKAFSRYSQLISHQSIHIGVKPYDCKECGKAFRLLSQLTQHQSIHIGEKPYKCKECGKAFRLRQKLTLHQSIHTGEKPFECKECRKAFRLNSSLIQHLRIHSGEKPYECKECKKAFRQHSHLTHHLKIHNVKI

SEQ ID NO: 15936 - protein, 636 aa, Homo Sapiens
MAPRPPTAAPQESVTFKDVSVDFTQEEWYHVDPAQRSLYRDVMLENYSHLVSLGYQVSKPEVIFKLEQGEEPWISEGEIQRPFYPDWKTRPEVKSSHLQQDVSEVSHCTHDLLHATLEDSWDVSSQLDRQQENWKRHLGSEASTQKKIITPQENFEQNKFGENSRLNTNLVTQLNIPARIRPSECETLGSNLGHNADLLNENNILAKKKPYKCDKCRKAFIHRSSLTKHEKTHKGEGAFPNGTDQGIYPGKKHHECTDCGKTFLWKTQLTEHQRIHTGEKPFECNVCGKAFRHSSSLGQHENAHTGEKPYQCSLCGKAFQRSSSLVQHQRIHTGEKPYRCNLCGRSFRHGTSLTQHEVTHSGEKPFQCKECGKAFSRCSSLVQHERTHTGEKPFECSICGRAFGQSPSLYKHMRIHKRGKPYQSSNYSIDFKHSTSLTQDESTLTEVKSYHCNDCGEDFSHITDFTDHQRIHTAENPYDCEQAFSQQAISHPGEKPYQCNVCGKAFKRSTSFIEHHRIHTGEKPYECNECGEAFSRRSSLTQHERTHTGEKPYECIDCGKAFSQSSSLIQHERTHTGEKPYECNECGRAFRKKTNLHDHQRIHTGEKPYSCKECGKNFSRSSALTKHQRIHTRNKL

SEQ ID NO: 15937 - protein, 570 aa, Homo Sapiens
MPGETEEPRPPEQQDQEGGEAAKAAPEEPQQRPPEAVAAAPAGTTSSRVLRGGRDRGRAAAAAAAAAVSRRRKAEYPRRRRSSPSARPPDVPGQQPQAAKSPSPVQGKKSPRLLCIEKVTTDKDPKEEKEEEDDSALPQEVSIAASRPSRGWRSSRTSVSRHRDTENTRSSRSKTGSLQLICKSEPNTDQLDYDVGEEHQSPGGISSEEEEEEEEEMLISEEEIPFKDDPRDETYKPHLERETPKPRRKSGKVKEEKEKKEIKVEVEVEVKEEENEIREDEEPPRKRGRRRKDDKSPRLPKRRKKPPIQYVRCEMEGCGTVLAHPRYLQHHIKYQHLLKKKYVCPHPSCGRLFRLQKQLLRHAKHHTDQRDYICEYCARAFKSSHNLAVHRMIHTGEKPLQCEICGFTCRQKASLNWHMKKHDADSFYQFSCNICGKKFEKKDSVVAHKAKSHPEVLIAEALAANAGALITSTDILGTNPESLTQPSDGQGLPLLPEPLGNSTSGECLLLEAEGMSKSYCSGTERVSLMADGKIFVGSGSSGGTEGLVMNSDILGATTEVLIEDSDSAGP

SEQ ID NO: 15938 - protein, 416 aa, Homo Sapiens
MAAILLTTRPKVPVSFEDVSVYFTKTEWKLLDLRQKVLYKRVMLENYSHLVSLGFSFSKPHLISQLERGEGPWVADIPRTWATAGLHIGDRTQSKTSTSTQKHSGRQLPGADPQGGKEGQAARSSVLQRGAQGLGQSSAAGPQGPKGAEKRYLCQQCGKAFSRSSNLIKHRIIHSGEKPYACPECGKLFRRSFALLEHQRIHSGEKPYACPECSKTFTRSSNLIKHQVIHSGERPFACGDCGKLFRRSFALLEHARVHSGERPYACPECGKAFSRSSNLIEHQRTHRGEKPYACGQCAKAFKGVSQLIHHQRSHSGERPFACRECGKAFRGRSGLSQHRRVHSGEKPYECSDCGKAFGRRANLFKHQAVHGARRPAKAETARRLAGPGSTGPGSAVAATSPPRPSTAARPSRPSRR

SEQ ID NO: 15939 - protein, 1006 aa, Homo Sapiens
MSRRKQSNPRQIKRSLGDMEAREEVQLVGASHMEQKATAPEAPSPPSADVNSPPPLPPPTSPGGPKELEGQEPEPRPTEEEPGSPWSGPDELEPVVQDGQRRIRARLSLATGLSWGPFHGSVQTRASSPRQAEPSPALTLLLVDEACWLRTLPQALTEAEANTEIHRKDDALWCRVTKPVPAGGLLSVLLTAEPHSTPGHPVKKEPAEPTCPAPAHDLQLLPQQAGMASILATAVINKDVFPCKDCGIWYRSERNLQAHLLYYCASRQGTGSPAAAATDEKPKETYPNERVCPFPQCRKSCPSASSLEIHMRSHSGERPFVCLICLSAFTTKANCERHLKVHTDTLSGVCHSCGFISTTRDILYSHLVTNHMVCQPGSKGEIYSPGAGHPATKLPPDSLGSFQQQHTALQGPLASADLGLAPTPSPGLDRKALAEATNGEARAEPLAQNGGSSEPPAAPRSIKVEAVEEPEAAPILGPGEPGPQAPSRTPSPRSPAPARVKAELSSPTPGSSPVPGELGLAGALFLPQYVFGPDAAPPASEILAKMSELVHSRLQQGAGAGAGGAQTGLFPGAPKGATCFECEITFSNVNNYYVHKRLYCSGRRAPEDAPAARRPKAPPGPARAPPGQPAEPDAPRSSPGPGAREEGAGGAATPEDGAGGRGSEGSQSPGSSVDDAEDDPSRTLCEACNIRFSRHETYTVHKRYYCASRHDPPPRRPAAPPGPPGPAAPPAPSPAAPVRTRRRRKLYELHAAGAPPPPPPGHAPAPESPRPGSGSGSGPGLAPARSPGPAADGPIDLSKKPRRPLPGAPAPALADYHECTACRVSFHSLEAYLAHKKYSCPAAPPPGALGLPAAACPYCPPNGPVRGDLLEHFRLAHGLLLGAPLAGPGVEARTPADRGPSPAPAPAASPQPGSRGPRDGLGPEPQEPPPGPPPSPAAAPEAVPPPPAPPSYSDKGVQTPSKGTPAPLPNGNHRYCRLCNIKFSSLSTFIAHKKYYCSSHAAEHVK

SEQ ID NO: 15940 - protein, 1151 aa, Homo Sapiens
MSRRKQSKPRQIKRPLEDAIEDEEEECPSEETDIISKGDFPLEESFSTEFGPENLSCEEVEYFCNKGDDEGIQETAESDGDTQSEKPGQPGVETDDWDGPGELEVFQKDGERKIQSRQQLPVGTTWGPFPGKMDLNNNSLKTKAQVPMVLTAGPKWLLDVTWQGVEDNKNNCIVYSKGGQLWCTTTKAISEGEELIAFVVDFDSRLQAASQMTLTEGMYPARLLDSIQLLPQQAAMASILPTAIVNKDIFPCKSCGIWYRSERNLQAHLMYYCSGRQREAAPVSEENEDSAHQISSLCPFPQCTKSFSNARALEMHLNSHSGVKMEEFLPPGASLKCTVCSYTADSVINFHQHLFSHLTQAAFRCNHCHFGFQTQRELLQHQELHVPSGKLPRESDMEHSPSATEDSLQPATDLLTRSELPQSQKAMQTKDASSDTELDKCEKKTQLFLTNQRPEIQPTTNKQSFSYTKIKSEPSSPRLASSPVQPNIGPSFPVGPFLSQFSFPQDITMVPQASEILAKMSELVHRRLRHGSSSYPPVIYSPLMPKGATCFECNITFNNLDNYLVHKKHYCSSRWQQMAKSPEFPSVSEKMPEALSPNTGQTSINLLNPAAHSADPENPLLQTSCINSSTVLDLIGPNGKGHDKDFSTQTKKLSTSSNNDDKINGKPVDVKNPSVPLVDGESDPNKTTCEACNITFSRHETYMVHKQYYCATRHDPPLKRSASNKVPAMQRTMRTRKRRKMYEMCLPEQEQRPPLVQQRFLDVANLNNPCTSTQEPTEGLGECYHPRCDIFPGIVSKHLETSLTINKCVPVSKCDTTHSSVSCLEMDVPIDLSKKCLSQSERTTTSPKRLLDYHECTVCKISFNKVENYLAHKQNFCPVTAHQRNDLGQLDGKVFPNPESERNSPDVSYERSIIKCEKNGNLKQPSPNGNLFSSHLATLQGLKVFSEAAQLIATKEENRHLFLPQCLYPGAIKKAKGADQLSPYYGIKPSDYISGSLVIHNTDIEQSRNAENESPKGQASSNGCAALKKDSLPLLPKNRGMVIVNGGLKQDERPAANPQQENISQNPQHEDDHKSPSWISENPLAANENVSPGIPSAEEQLSSIAKGVNGSSQAPTSGKYCRLCDIQFNNLSNFITHKKFYCSSHAAEHVK

SEQ ID NO: 15941 - protein, 805 aa, Homo Sapiens
MDEDGLELQQEPNSFFDATGADGTHMDGDQIVVEVQETVFVSDVVDSDITVHNFVPDDPDSVVIQDVIEDVVIEDVQCPDIMEEADVSETVIIPEQVLDSDVTEEVSLAHCTVPDDVLASDITSASMSMPEHVLTGDSIHVSDVGHVGHVGHVEHVVHDSVVEAEIVTDPLTTDVVSEEVLVADCASEAVIDANGIPVDQQDDDKGNCEDYLMISLDDAGKIEHDGSSGMTMDTESEIDPCKVDGTCPEVIKVYIFKADPGEDDLGGTVDIVESEPENDHGVELLDQNSSIRVPREKMVYMTVNDSQPEDEDLNVAEIADEVYMEVIVGEEDAAAAAAAAAVHEQQMDDNEIKTFMPIAWAAAYGNNSDGIENRNGTASALLHIDESAGLGRLAKQKPKKRRRPDSRQYQTAIIIGPDGHPLTVYPCMICGKKFKSRGFLKRHMKNHPEHLAKKKYRCTDCDYTTNKKISLHNHLESHKLTSKAEKAIECDECGKHFSHAGALFTHKMVHKEKGANKMHKCKFCEYETAEQGLLNRHLLAVHSKNFPHICVECGKGFRHPSELKKHMRIHTGEKPYQCQYCEYRSADSSNLKTHVKTKHSKEMPFKCDICLLTFSDTKEVQQHALIHQESKTHQCLHCDHKSSNSSDLKRHIISVHTKDYPHKCDMCDKGFHRPSELKKHVAAHKGKKMHQCRHCDFKIADPFVLSRHILSVHTKDLPFRCKRCRKGFRQQSELKKHMKTHSGRKVYQCEYCEYSTTDASGFKRHVISIHTKDYPHRCEYCKKGFRRPSEKNQHIMRHHKEVGLP

SEQ ID NO: 15942 - protein, 801 aa, Homo Sapiens
MDEDEFELQPQEPNSFFDGIGADATHMDGDQIVVEIQEAVFVSNIVDSDITVHNFVPDDPDSVVIQDVVEDVVIEEDVQCSDILEEADVSENVIIPEQVLDSDVTEEVSLPHCTVPDDVLASDITSTSMSMPEHVLTSESMHVCDIGHVEHMVHDSVVEAEIITDPLTSDIVSEEVLVADCAPEAVIDASGISVDQQDNDKASCEDYLMISLDDAGKIEHDGSTGVTIDAESEMDPCKVDSTCPEVIKVYIFKADPGEDDLGGTVDIVESEPENDHGVELLDQNSSIRVPREKMVYMTVNDSQQEDEDLNVAEIADEVYMEVIVGEEDAAVAAAAAAVHEQQIDEDEMKTFVPIAWAAAYGNNSDGIENRNGTASALLHIDESAGLGRLAKQKPKKKRRPDSRQYQTAIIIGPDGHPLTVYPCMICGKKFKSRGFLKRHMKNHPEHLAKKKYHCTDCDYTTNKKISLHNHLESHKLTSKAEKAIECDECGKHFSHAGALFTHKMVHKEKGANKMHKCKFCEYETAEQGLLNRHLLAVHSKNFPHICVECGKGFRHPSELRKHMRIHTGEKPYQCQYCEYRSADSSNLKTHIKTKHSKEMPFKCDICLLTFSDTKEVQQHTLVHQESKTHQCLHCDHKSSNSSDLKRHVISVHTKDYPHKCEMCEKGFHRPSELKKHVAVHKGKKMHQCRHCDFKIADPFVLSRHILSVHTKDLPFRCKRCRKGFRQQNELKKHMKTHSGRKVYQCEYCEYSTTDASGFKRHVISIHTKDYPHRCEYCKKGFRRPSEKNQHIMRHHKEVGLP

SEQ ID NO: 15943 - protein, 2539 aa, Homo Sapiens [sequence omitted]

SEQ ID NO: 15944 - protein, 271 aa, Homo Sapiens
MTEPQVGCVACPRVHKEPAQVGTPWPAKPRSHPRKRDPTALLPRSLWPACQESVTALCFLQETVERLGQSPAQDTPVLGPCWDPMALGTQGRLLLDRDSKDTQTRISQKGRRLQPPGTPSAPPQRRPRKQLNPCRGTERVDPGFEGVTLKFQIKPDSSLQIIPTYSLPCSSRSQESPADAVGGPAAHPGGTEAHSAGSEALEPRRCASCRTQRTPLWRDAEDGTPLCNACGIRYKKYGTRCSSCWLVPRKNVQPKRLCGRCGVSLDPIQEG

SEQ ID NO: 15945 - protein, 531 aa, Homo Sapiens
MDEESLESALQTYRAQLQQVELALGAGLDSSEQADLRQLQGDLKELIELTEASLVSVRKSSLLAALDEERPGRQEDAEYQAFREAITEAVEAPAAARGSGSETVPKAEAGPESAAGGQEEEEGEDEEELSGTKVSAPYYSSWGTLEYHNAMVVGTEEAEDGSAGVRVLYLYPTHKSLKPCPFFLEGKCRFKENCRFSHGQVVSLDELRPFQDPDLSSLQAGSACLAKHQDGLWHAARITDVDNGYYTVKFDSLLLREAVVEGDGILPPLRTEATESDSDSDGTGDSSYARVVGSDAVDSAQSSALCPSLAVVGSDAVDSGTCSSAFAGWEVHTRGIGSRLLTKMGYEFGKGLGRHAEGRVEPIHAVVLPRGKSLDQCVETLQKQTRVGKAGTNKPPRCRGRGARPGGRPAPRNVFDFLNEKLQGQAPGALEAGAAPAGRRSKDMYHASKSAKRALSLRLFQTEEKIERTQRDIRSIQEALARNAGRHSVASAQLQEKLAGAQRQLGQLRAQEAGLQQEQRKADTHKKMTEF

SEQ ID NO: 15946 - protein, 873 aa, Homo Sapiens
MASRRKSTTPCMVLASEQDPDLELISDLDEGPPVLTPVENTRAESISSDEEVHESVDSDNQQNKKVEGGYECKYCTFQTPDLNMFTFHVDSEHPNVVLNSSYVCVECNFLTKRYDALSEHNLKYHPGEENFKLTMVKRNNQTIFEQTINDLTFDGSFVKEENAEQAESTEVSSSGISISKTPIMKMMKNKVENKRIAVHHNSVEDVPEEKENEIKPDREEIVENPSSSASESNTSTSIVNRIHPSTASTVVTPAAVLPGLAQVITAVSAQQNSNLIPKVLIPVNSIPTYNAALDNNPLLLNTYNKFPYPTMSEITVLSAQAKYTEEQIKIWFSAQRLKHGVSWTPEEVEEARRKQFNGTVHTVPQTITVIPTHISTGSNGLPSILQTCQIVGQPGLVLTQVAGTNTLPVTAPIALTVAGVPSQNNIQKSQVPAAQPTAETKPATAAVPTSQSVKHETALVNPDSFGIRAKKTKEQLAELKVSYLKNQFPHDSEIIRLMKITGLTKGEIKKWFSDTRYNQRNSKSNQCLHLNNDSSTTIIIDSSDETTESPTVGTAQPKQSWNPFPDFTPQKFKEKTAEQLRVLQASFLNSSVLTDEELNRLRAQTKLTRREIDAWFTEKKKSKALKEEKMEIDESNAGSSKEEAGETSPADESGAPKSGSTGKICKKTPEQLHMLKSAFVRTQWPSPEEYDKLAKESGLARTDIVSWFGDTRYAWKNGNLKWYYYYQSANSSSMNGLSSLRKRGRGRPKGRGRGRPRGRPRGSKRINNWDRGPSLIKFKTGTAILKDYYLKHKFLNEQDLDELVNKSHMGYEQVREWFAERQRRSELGIELFEENEEEDEVIDDQEEDEEETDDSDTWEPPRHVKRKLSKSDD

SEQ ID NO: 15947 - protein, 837 aa, Homo Sapiens
MASKRKSTTPCMVRTSQVVEQDVPEEVDRAKEKGIGTPQPDVAKDSWAAELENSSKENEVIEVKSMGESQSKKLQGGYECKYCPYSTQNLNEFTEHVDMQHPNVILNPLYVCAECNFTTKKYDSLSDHNSKFHPGEANFKLKLIKRNNQTVLEQSIETTNHVVSITTSGPGTGDSDSGISVSKTPIMKPGKPKADAKKVPKKPEEITPENHVEGTARLVTDTAEILSRLGGVELLQDTLGHVMPSVQLPPNINLVPKVPVPLNTTKYNSALDTNATMINSFNKFPYPTQAELSWLTAASKHPEEHIRIWFATQRLKHGISWSPEEVEEARKKMFNGTIQSVPPTITVLPAQLAPTKVTQPILQTALPCQILGQTSLVLTQVTSGSTTVSCSPITLAVAGVTNHGQKRPLVTPQAAPEPKRPHIAQVPEPPPKVANPPLTPASDRKKTKEQIAHLKASFLQSQFPDDAEVYRLIEVTGLARSEIKKWFSDHRYRCQRGIVHITSESLAKDQLAIAASRHGRTYHAYPDFAPQKFKEKTQGQVKILEDSFLKSSFPTQAELDRLRVETKLSRREIDSWFSERRKLRDSMEQAVLDSMGSGKKGQDVGAPNGALSRLDQLSGAQLTSSLPSPSPAIAKSQEQVHLLRSTFARTQWPTPQEYDQLAAKTGLVRTEIVRWFKENRCLLKTGTVKWMEQYQHQPMADDHGYDAVARKATKPMAESPKNGGDVVPQYYKDPKKLCEEDLEKLVTRVKVGSEPAKDCLPAKPSEATSDRSEGSSRDGQGSDENEESSVVDYVEVTVGEEDAISDRSDSWSQAAAEGVSELAESDSDCVPAEAGQA

SEQ ID NO: 15948 - protein, 956 aa, Homo Sapiens
MASKRKSTTPCMIPVKTVVLQDASMEAQPAETLPEGPQQDLPPEASAASSEAAQNPSSTDGSTLANGHRSTLDGYLYSCKYCDFRSHDMTQFVGHMNSEHTDFNKDPTFVCSGCSFLAKTPEGLSLHNATCHSGEASFVWNVAKPDNHVVVEQSIPESTSTPDLAGEPSAEGADGQAEIIITKTPIMKIMKGKAEAKKIHTLKENVPSQPVGEALPKLSTGEMEVREGDHSFINGAVPVSQASASSAKNPHAANGPLIGTVPVLPAGIAQFLSLQQQPPVHAQHHVHQPLPTAKALPKVMIPLSSIPTYNAAMDSNSFLKNSFHKFPYPTKAELCYLTVVTKYPEEQLKIWFTAQRLKQGISWSPEEIEDARKKMFNTVIQSVPQPTITVLNTPLVASAGNVQHLIQAALPGHVVGQPEGTGGGLLVTQPLMANGLQATSSPLPLTVTSVPKQPGVAPINTVCSNTTSAVKVVNAAQSLLTACPSITSQAFLDASIYKNKKSHEQLSALKGSFCRNQFPGQSEVEHLTKVTGLSTREVRKWFSDRRYHCRNLKGSRAMIPGDHSSIIIDSVPEVSFSPSSKVPEVTCIPTTATLATHPSAKRQSWHQTPDFTPTKYKERAPEQLRALESSFAQNPLPLDEELDRLRSETKMTRREIDSWFSERRKKVNAEETKKAEENASQEEEEAAEDEGGEEDLASELRVSGENGSLEMPSSHILAERKVSPIKINLKNLRVTEANGRNEIPGLGACDPEDDESNKLAEQLPGKVSCKKTAQQRHLLRQLFVQTQWPSNQDYDSIMAQTGLPRPEVVRWFGDSRYALKNGQLKWYEDYKRGNFPPGLLVIAPGNRELLQDYYMTHKMLYEEDLQNLCDKTQMSSQQVKQWFAEKMGEETRAVADTGSEDQGPGTGELTAVHKGMGDTYSEVSENSESWEPRVPEASSEPFDTSSPQAGRQLETD

SEQ ID NO: 15949 - protein, 447 aa, Homo Sapiens
MLLDAGPQYPAIGVTTFGASRHHSAGDVAERDVGLGINPFADGMGAFKLNPSSHELASAGQTAFTSQAPGYAAAAALGHHHHPGHVGSYSSAAFNSTRDFLFRNRGFGDAAAAASAQHSLFAASAGGFGGPHGHTDAAGHLLFPGLHEQAAGHASPNVVNGQMRLGFSGDMYPRPEQYGQVTSPRSEHYAAPQLHGYGPMNVNMAAHHGAGAFFRYMRQPIKQELICKWIEPEQLANPKKSCNKTFSTMHELVTHVTVEHVGGPEQSNHICFWEECPREGKPFKAKYKLVNHIRVHTGEKPFPCPFPGCGKVFARSENLKIHKRTHTGEKPFKCEFEGCDRRFANSSDRKKHMHVHTSDKPYLCKMCDKSYTHPSSLRKHMKVHESSSQGSQPSPAASSGYESSTPPTIVSPSTDNPTTSSLSPSSSAVHHTAGHSALSSNFNEWYV

SEQ ID NO: 15950 - protein, 532 aa, Homo Sapiens
MLLDAGPQFPAIGVGSFARHHHHSAAAAAAAAAEMQDRELSLAAAQNGFVDSAAAHMGAFKLNPGAHELSPGQSSAFTSQGPGAYPGSAAAAAAAAALGPHAAHVGSYSGPPFNSTRDFLFRSRGFGDSAPGGGQHGLFGPGAGGLHHAHSDAQGHLLFPGLPEQHGPHGSQNVLNGQMRLGLPGEVFGRSEQYRQVASPRTDPYSAAQLHNQYGPMNMNMGMNMAAAAAHHHHHHHHHPGAFFRYMRQQCIKQELICKWIDPEQLSNPKKSCNKTFSTMHELVTHVSVEHVGGPEQSNHVCFWEECPREGKPFKAKYKLVNHIRVHTGEKPFPCPFPGCGKVFARSENLKIHKRTHTGEKPFQCEFEGCDRRFANSSDRKKHMHVHTSDKPYLCKMCDKSYTHPSSLRKHMKVHESSPQGSESSPAASSGYESSTPPGLVSPSAEPQSSSNLSPAAAAAAAAAAAAAAAVSAVHRGGGSGSGGAGGGSGGGSGSGGGGGGAGGGGGGSSGGGSGTAGGHSGLSSNFNEWYV

SEQ ID NO: 15951 - protein, 467 aa, Homo Sapiens
MTMLLDGGPQFPGLGVGSFGAPRHHEMPNREPAGMGLNPFGDSTHAAAAAAAAAAFKLSPAAAHDLSSGQSSAFTPQGSGYANALGHHHHHHHHHHHTSQVPSYGGAASAAFNSTREFLFRQRSSGLSEAASGGGQHGLFAGSASSLHAPAGIPEPPSYLLFPGLHEQGAGHPSPTGHVDNNQVHLGLRGELFGRADPYRPVASPRTDPYAAGAQFPNYSPMNMNMGVNVAAHHGPGAFFRYMRQPIKQELSCKWIDEAQLSRPKKSCDRTFSTMHELVTHVTMEHVGGPEQNNHVCYWEECPREGKSFKAKYKLVNHIRVHTGEKPFPCPFPGCGKIFARSENLKIHKRTHTGEKPFKCEFEGCDRRFANSSDRKKHMHVHTSDKPYICKVCDKSYTHPSSLRKHMKVHESQGSDSSPAASSGYESSTPPAIASANSKDTTKTPSAVQTSTSHNPGLPPNFNEWYV

SEQ ID NO: 15952 - protein, 334 aa, Homo Sapiens; identical to SEQ ID NO: 14389

SEQ ID NO: 15953 - protein, 663 aa, Homo Sapiens
MFLKAGRGNKVPPVRVYGPDCVVLMEPPLSKRNPPALRLADLATAQVQPLQNMTGFPALAGPPAHSQLRAAVAHLRLRDLGADPGVATTPLGPEHMAQASTLGLSPPSQAFPAHPEAPAAAARAAALVAHPGAGSYPCGGGSSGAQPSAPPPPAPPLPPTPSPPPPPPPPPPPALSGYTTTNSGGGGSSGKGHSRDFVLRRDLSATAPAAAMHGAPLGGEQRSGTGSPQHPAPPPHSAGMFISASGTYAGPDGSGGPALFPALHDTPGAPGGHPHPLNGQMRLGLAAAAAAAAAELYGRAEPPFAPRSGDAHYGAVAAAAAAALHGYGAVNLNLNLAAAAAAAAAGPGPHLQHHAPPPAPPPPPAPAQHPHQHHPHLPGAAGAFLRYMRQPIKQELICKWIDPDELAGLPPPPPPPPPPPPPPPAGGAKPCSKTFGTMHELVNHVTVEHVGGPEQSSHVCFWEDCPREGKPFKAKYKLINHIRVHTGEKPFPCPFPGCGKVFARSENLKIHKRTHTGEKPFKCEFDGCDRKFANSSDRKKHSHVHTSDKPYYCKIRGCDKSYTHPSSLRKHMKIHCKSPPPSPGPLGYSSVGTPVGAPLSPVLDPARSHSSTLSPQVTNLNEWYVCQASGAPSHLHTPSSNGTTSETEDEEIYGNPEVVRTIH

SEQ ID NO: 15954 - protein, 487 aa, Homo Sapiens
MAAAALRAPTQVTVSPETHMDLTKGCVTFEDIAIYFSQDEWGLLDEAQRLLYLEVMLENFALVASLGCGHGTEDEETPSDQNVSVGVSQSKAGSSTQKTQSCEMCVPVLKDILHLADLPGQKPYLVGECTNHHQHQKHHSAKKSLKRDMDRASYVKCCLFCMSLKPFRKWEVGKDLPAMLRLLRSLVFPGGKKPGTITECGEDIRSQKSHYKSGECGKASRHKHTPVYHPRVYTGKKLYECSKCGKAFRGKYSLVQHQRVHTGERPWECNECGKFFSQTSHLNDHRRIHTGERPYECSECGKLFRQNSSLVDHQKIHTGARPYECSQCGKSFSQKATLVKHQRVHTGERPYKCGECGNSFSQSAILNQHRRIHTGAKPYECGQCGKSFSQKATLIKHQRVHTGERPYKCGDCGKSFSQSSILIQHRRIHTGARPYECGQCGKSFSQKSGLIQHQVVHTGERPYECNKCGNSFSQCSSLIHHQKCHNT

SEQ ID NO: 15955 - protein, 527 aa, Homo Sapiens
MYQPEDDNNSDVTSDDDMTRNRRESSPPHSVHSFSGDRDWDRRGRSRDMEPRDRWSHTRNPRSRMPPRDLSLPVVAKTSFEMDREDDRDSRAYESRSQDAESYQNVVDLAEDRKPHNTIQDNMENYRKLLSLGFLAQDSVPAEKRNTEMLDNLPSAGSQFPDFKHLGTFLVFEELVTFEDVLVDFSPEELSSLSAAQRNLYREVMLENYRNLVSLGHQFSKPDIISRLEEEESYAMETDSRHTVICQGESHDDPLEPHQGNQEKLLTPITMNDPKTLTPERSYGSDEFERSSNLSKQSKDPLGKDPQEGTAPGICTSPQSASQENKHNRCEFCKRTFSTQVALRRHERIHTGKKPYECKQCAEAFYLMPHLNRHQKTHSGRKTSGCNEGRKPSVQCANLCERVRIHSQEDYFECFQCGKAFLQNVHLLQHLKAHEAARVLPPGLSHSKTYLIRYQRKHDYVGERACQCCDCGRVFSRNSYLIQHYRTHTQERPYQCQLCGKCFGRPSYLTQHYQLHSQEKTVECDHC

SEQ ID NO: 15956 - protein, 472 aa, Homo Sapiens
MNNSQGRVTFEDVTVNFTQGEWQRLNPEQRNLYRDVMLENYSNLVSVGQGETTKPDVILRLEQGKEPWLEEEEVLGSGRAEKNGDIGGQIWKPKDVKESLAREVPSINKETLTTQKGVECDGSKKILPLGIDDVSSLQHYVQNNSHDDNGYRKLVGNNPSKFVGQQLKCNACRKLFSSKSRLQSHLRRHACQKPFECHSCGRAFGEKWKLDKHQKTHAEERPYKCENCGNAYKQKSNLFQHQKMHTKEKPYQCKTCGKAFSWKSSCINHEKIHNAKKSYQCNECEKSFRQNSTLIQHKKVHTGQKPFQCTDCGKAFIYKSDLVKHQRIHTGEKPYKCSICEKAFSQKSNVIDHEKIHTGKRAYECDLCGNTFIQKKNLIQHKKIHTGEKPYECNRCGKAFFQKSNLHSHQKTHSGERTYRCSECGKTFIRKLNLSLHKKTHTGQKPYGCSECGKAFADRSYLVRHQKRIHSR

SEQ ID NO: 15957 - protein, 563 aa, Homo Sapiens
MMTAESREATGLSPQAAQEKDGIVIVKVEEEDEEDHMWGQDSTLQDTPPPDPEIFRQRFRRFCYQNTFGPREALSRLKELCHQWLRPEINTKEQILELLVLEQFLSILPKELQVWLQEYRPDSGEEAVTLLEDLELDLSGQQVPGQVHGPEMLARGMVPLDPVQESSSFDLHHEATQSHFKHSSRKPRLLQSRALPAAHIPAPPHEGSPRDQAMASALFTADSQAMVKIEDMAVSLILEEWGCQNLARRNLSRDNRQENYGSAFPQGGENRNENEESTSKAETSEDSASRGETTGRSQKEFGEKRDQEGKTGERQQKNPEEKTRKEKRDSGPAIGKDKKTITGERGPREKGKGLGRSFSLSSNFTTPEEVPTGTKSHRCDECGKCFTRSSSLIRHKIIHTGEKPYECSECGKAFSLNSNLVLHQRIHTGEKPHECNECGKAFSHSSNLILHQRIHSGEKPYECNECGKAFSQSSDLTKHQRIHTGEKPYECSECGKAFNRNSYLILHRRIHTREKPYKCTKCGKAFTRSSTLTLHHRIHARERASEYSPASLDAFGAFLKSCV

SEQ ID NO: 15958 - protein, 967 aa, Homo Sapiens
MAVALDSQIDAPLEVEGCLIMKVEKDPEWASEPILEGSDSSETFRKCFRQFCYEDVTGPHEAFSKLWELCCRWLKPEMRSKEQILELLVIEQFLTILPEKIQAWAQKQCPQSGEEAVALVVHLEKETGRLRQQVSSPVHREKHSPLGAAWEVADFQPEQVETQPRAVSREEPGSLHSGHQEQLNRKRERRPLPKNARPSPWVPALADEWNTLDQEVTTTRLPAGSQEPVKDVHVARGFSYRKSVHQIPAQRDLYRDFRKENVGNVVSLGSAVSTSNKITRLEQRKEPWTLGLHSSNKRSILRSNYVKEKSVHAIQVPARSAGKTWREQQQWGLEDEKIAGVHWSYEETKTFLAILKESRFYETLQACPRNSQVYGAVAEWLRECGFLRTPEQCRTKFKSLQKSYRKVRNGHMLEPCAFFEDMDALLNPAARAPSTDKPKEMIPVPRLKRIAISAKEHISLVEEEEAAEDSDDDEIGIEFIRKSEIHGAPVLFQNLSGVHWGYEETKTFLDILRETRFYEALQACHRKSKLYGAVAEQLRECGFLRTPEQCRTKFKSLQKSYRKVKNGHVLESCAFYKEMDALINSRASAPSPSTPEEVPSPSRQERGGIEVEPQEPTGWEPEETSQEAVIEDSCSERMSEEEIVQEPEFQGPPGLLQSPNDFEIGSSIKEDPTQIVYKDMEQHRALIEKSKRVVSQSTDPSKYRKRECISGRQWENLQGIRQGKPMSQPRDLGKAVVHQRPFVGKRPYRLLKYGESFGRSTRLMCRMTHHKENPYKCGVCGKCFGRSRSLIRHQRIHTGEKPFKCLDCGKSFNDSSNFGAHQRIHTGEKPYRCGECGKCFSQSSSLIIHQRTHTGEKPYQCGECGKSFTNSSHFSAHRRVHTGENPYKCVDCEKSFNNCTRFREHRRIHTGEKPYGCAQCGKRFSKSSVLTKHREVHVREKPLPHPPSLYCPENPHKGKTDEFRKTF

SEQ ID NO: 15959 - protein, 538 aa, Homo Sapiens
MARELSESTALDAQSTEDQMELLVIKVEEEEAGFPSSPDLGSEGSRERFRGFRYPEAAGPREALSRLRELCRQWLQPEMHSKEQILELLVLEQFLTILPGNLQSWVREQHPESGEEVVVLLEYLERQLDEPAPQVSGVDQGQELLCCKMALLTPAPGSQSSQFQLMKALLKHESVGSQPLQDRVLQVPVLAHGGCCREDKVVASRLTPESQGLLKVEDVALTLTPEWTQQDSSQGNLCRDEKQENHGSLVSLGDEKQTKSRDLPPAEELPEKEHGKISCHLREDIAQIPTCAEAGEQEGRLQRKQKNATGGRRHICHECGKSFAQSSGLSKHRRIHTGEKPYECEECGKAFIGSSALVIHQRVHTGEKPYECEECGKAFSHSSDLIKHQRTHTGEKPYECDDCGKTFSQSCSLLEHHRIHTGEKPYQCSMCGKAFRRSSHLLRHQRIHTGDKNVQEPEQGEAWKSRMESQLENVETPMSYKCNECERSFTQNTGLIEHQKIHTGEKPYQCNACGKGFTRISYLVQHQRSHVGKNILSQ

SEQ ID NO: 15960 - protein, 545 aa, Homo Sapiens
MAREPRKNAALDAQSAEDQTGLLTVKVEKEEASALTAEVRAPCSPARGPERSRQRFRGFRYPEAAGPREALSRLRELCGQWLQPEMHSKEQILELLVLEQFLTILPGNLQSWVREQHPESGEEVVVLLEYLERQLDEPAPQVPVGDQGQELLCCKMALLTQTQGSQSSQCQPMKALFKHESLGSQPLHDRVLQVPGLAQGGCCREDAMVASRLTPGSQGLLKMEDVALTLTPGWTQLDSSQVNLYRDEKQENHSSLVSLGGEIQTKSRDLPPVKKLPEKEHGKICHLREDIAQIPTHAEAGEQEGRLQRKQKNAIGSRRHYCHECGKSFAQSSGLTKHRRIHTGEKPYECEDCGKTFIGSSALVIHQRVHTGEKPYECEECGKVFSHSSNLIKHQRTHTGEKPYECDDCGKTFSQSCSLLEHHKIHTGEKPYQCNMCGKAFRRNSHLLRHQRIHGDKNVQNPEHGESWESQGRTESQWENTEAPVSYKCNECERSFTRNRSLIEHQKIHTGEKPYQCDTCGKGFTRTSYLVQHQRSHVGKKTLSQ

SEQ ID NO: 15961 - protein, 839 aa, Homo Sapiens
MIMTESREVIDLDPPAETSQEQEDLFIVKVEEEDCTWMQEYNPPTFETFYQRFRHFQYHEASGPREALSQLRVLCCEWLRPELHTKEQILELLVLEQFLTILPEEFQPWVREHHPESGEEAVAVIENIQRELEERRQQIVACPDVLPRKMATPGAVQESCSPHPLTVDTQPEQAPQKPRLLEENALPVLQVPSLPLKDSQELTASLLSTGSQKLVKIEEVADVAVSFILEEWGHLDQSQKSLYRDDRKENYGSITSMGYESRDNMELIVKQISDDSESHWVAPEHTERSVPQDPDFAEVSDLKGMVQRWQVNPTVGKSRQNPSQKRDLDAITDISPKQSTHGERGHRCSDCGKFFLQASNFIQHRRIHTGEKPFKCGECGKSYNQRVHLTQHQRVHTGEKPYKCQVCGKAFRVSSHLVQHHSVHSGERPYGCNECGKNFGRHSHLIEHLKRHFREKSQRCSDKRSKNTKLSVKKKISEYSEADMELSGKTQRNVSQVQDFGEGCEFQGKLDRKQGIPMKEILGQPSSKRMNYSEVPYVHKKSSTGERPHKCNECGKSFIQSAHLIQHQRIHTGEKPFRCEECGKSYNQRVHLTQHQRVHTGEKPYTCPLCGKAFRVRSHLVQHQSVHSGERPFKCNECGKGFGRRSHLAGHLRLHSREKSHQCRECGEIFFQYVSLIEHQVLHMGQKNEKNGICEEAYSWNLTVIEDKKIELQEQPYQCDICGKAFGYSSDLIQHYRTHTAEKPYQCDICRENVGQCSHTKQHQKIYSSTKSHQCHECGRGFTLKSHLNQHQRIHTGEKPFQCKECGMNFSWSCSLFKHLRSHERTDPINTLSVEGSLL

SEQ ID NO: 15962 - protein, 754 aa, Homo Sapiens
MTTAGRGNLGLIPRSTAFQKQEGRLTVKQEPANQTWGQGSSLQKNYPPVCEIFRLHFRQLCYHEMSGPQEALSRLRELCRWWLMPEVHTKEQILELLVLEQFLSILPGELRTWVQLHHPESGEEAVAVVEDFQRHLSGSEEVSAPAQKQEMHFEETTALGTTKESPPTSPLSGGSAPGAHLEPPYDPGTHHLPSGDFAQCTSPVPTLPQVGNSGDQAGATVLRMVRPQDTVAYEDLSVDYTQKKWKSLTLSQRALQWNMMPENHHSMASLAGENMMKGSELTPKQEFFKGSESSNRTSGGLFGVVPGAAETGDVCEDTFKELEGQTSDEEGSRLENDFLEITDEDKKKSTKDRYDKYKEVGEHPPLSSSPVEHEGVLKGQKSYRCDECGKAFNRSSHLIGHQRIHTGEKPYECNECGKTFRQTSQLIVHLRTHTGEKPYECSECGKAYRHSSHLIQHQRLHNGEKPYKCNECAKAFTQSSRLTDHQRTHTGEKPYECNECGEAFIRSKSLARHQVLHTGKKPYKCNECGRAFCSNRNLIDHQRIHTGEKPYECSECGKAFSRSKCLIRHQSLHTGEKPYKCSECGKAFNQNSQLIEHERIHTGEKPFECSECGKAFGLSKCLIRHQRLHTGEKPYKCNECGKSFNQNSHLIIHQRIHTGEKPYECNECGKVFSYSSSLMVHQRTHTGEKPYKCNDCGKAFSDSSQLIVHQRVHTGEKPYECSECGKAFSQRSTFNHHQRTHTGEKSSGLAWSVS

SEQ ID NO: 15963 - protein, 578 aa, Homo Sapiens
MAEESRKPSAPSPPDQTPEEDLVIVKVEEDHGWDQESSLHESNPLGQEVFRLRFRQLRYQETLGPREALIQLRALCHQWLRPDLNTKEQILELLVLEQFLTILPEELQTLVKEHQLENGEEVVTLLEDLERQIDILGRPVSARVHGHRVLWEEVVHSASAPEPPNTQLQSEATQHKSPVPQESQERAMSTSQSPTRSQKGSSGDQEMTATLLTAGFQTLEKIEDMAVSLIREEWLLDPSQKDLCRDNRPENFRNMFSLGGETRSENRELASKQVISTGIQPHGETAAKCNGDVIRGLEHEEARDLLGRLERQRGNPTQERRHKCDECGKSFAQSSGLVRHWRIHTGEKPYQCNVCGKAFSYRSALLSHQDIHNKVKRYHCKECGKAFSQNTGLILHQRIHTGEKPYQCNQCGKAFSQSAGLILHQRIHSGERPYECNECGKAFSHSSHLIGHQRIHTGEKPYECDECGKTFRRSSHLIGHQRSHTGEKPYKCNECGRAFSQKSGLIEHQRIHTGERPYKCKECGKAFNGNTGLIQHLRIHTGEKPYQCNECGKAFIQRSSLIRHQRIHSGEKSESISV

SEQ ID NO: 15964 - protein, 638 aa, Homo Sapiens
MESCSVTRLECSGAISAHCSLHLPGSSDSPASASQIAGTTDAIWNEQEKAELFTDKFCQVCGVMLQFESQRISHYEGEKHAQNVSFYFQMHGEQNEVPGKKMKMHVENFQVHRYEGVDKNKFCDLCNMMFSSPLIAQSHYVGKVHAKKLKQLMEEHDQASPSGFQPEMAFSMRTYVCHICSIAFTSLDMFRSHMQGSEHQIKESIVINLVKNSRKTQDSYQNECADYINVQKARGLEAKTCFRKMEESSLETRRYREVVDSRPRHRMFEQRLPFETFRTYAAPYNISQAMEKQLPHSKKTYDSFQDELEDYIKVQKARGLDPKTCFRKMRENSVDTHGYREMVDSGPRSRMCEQRFSHEASQTYQRPYHISPVESQLPQWLPTHSKRTYDSFQDELEDYIKVQKARGLEPKTCFRKIGDSSVETHRNREMVDVRPRHRMLEQKLPCETFQTYSGPYSISQVVENQLPHCLPAHDSKQRLDSISYCQLTRDCFPEKPVPLSLNQQENNSGSYSVESEVYKHLSSENNTADHQAGHKQKHQKRKRHLEEGKERPEKEQSKHKRKKSYEDTDLDKDKSIRQRKREEDRVKVSSGKLKHRKKKKSHDVPSEKEERKHRKEKKKSVEERTEEEMLWDESILGF

SEQ ID NO: 15965 - protein, 199 aa, Homo Sapiens
MASGSGTKNLDFRRKWDKDEYEKLAEKRLTEEREKKDGKPVQPVKRELLRHRDYKVDLESKLGKTIVITKTTPQSEMGGYYCNVCDCVVKDSINFLDHINGKKHQRNLGMSMRVERSTLDQVKKRFEVNKKKMEEKQKDYDFEERMKELREEEEKAKAYKKEKQKEKKRRAEEDLTFEEDDEMAAVMGFSGFGSTKKSY

SEQ ID NO: 15966 - protein, 289 aa, Homo Sapiens
MILLQHAVLPPPKQPSPSPPMSVATRSTGTLQLPPQKPFGQEASLPLAGEEELSKGGEQDCALEELCKPLYCKLCNVTLNSAQQAQAHYQGKNHGKKLRNYYAANSCPPPARMSNVVEPAATPVVPVPPQMGSFKPGGRVILATENDYCKLCDASFSSPAVAQAHYQGKNHAKRLRLAEAQSNSFSESSELGQRRARKEGNEFKMMPNRRNMYTVQNNSAGPYFNPRSRQRIPRDLAMCVTPSGQFYCSMCNVGAGEEMEFRQHLESKQHKSKVSEQRYRNEMENLGYV

SEQ ID NO: 15967 - protein, 229 aa, Homo Sapiens
MKSSDIDQDLFTDSYCKVCSAQLISESQRVAHYESRKHASKVRLYYMLHPRDGGCPAKRLRSENGSDADMVDKNKCCTLCNMSFTSAVVADSHYQGKIHAKRLKLLLGEKTPLKTTATPLSPLKPPRMDTAPVVASPYQRRDSDRYCGLCAAWFNNPLMAQQHYDGKKHKKNAARVALLEQLGTTLDMGELRGLRRNYRCTICSVSLNSIEQYHAHLKGSKHQTNLKNK

SEQ ID NO: 15968 - protein, 170 aa, Homo Sapiens
MGKRYFCDYCDRSFQDNLHNRKKHLNGLQHLKAKKVWYDMFRDAAAILLDEQNKRPCRKFLLTGQCDFGSNCRFSHMSERDLQELSIQVEEERRAREWLLDAPELPEGHLEDWLEKRAKRLSSAPSSRAEPIRTTVFQYPVGWPPVQELPPSLRAPPPGGWPLQPRVQWG

SEQ ID NO: 15969 - protein, 573 aa, Homo Sapiens
MDAKSLTAWSRTLVTFKDVFVDFTREEWKLLDTAQQIVYRNVMLENYKNLVSLGYQLTKPDVILRLEKGEEPWLVEREIHQETHPDSETAFEIKSSVSSRSIFKDKQSCDIKMEGMARNDLWYLSLEEVWKCRDQLDKYQENPERHLRQVAFTQKKVLTQERVSESGKYGGNCLLPAQLVLREYFHKRDSHTKSLKHDLVLNGHQDSCASNSNECGQTFCQNIHLIQFARTHTGDKSYKCPDNDNSLTHGSSLGISKGIHREKPYECKECGKFFSWRSNLTRHQLIHTGEKPYECKECGKSFSRSSHLIGHQKTHTGEEPYECKECGKSFSWFSHLVTHQRTHTGDKLYTCNQCGKSFVHSSRLIRHQRTHTGEKPYECPECGKSFRQSTHLILHQRTHVRVRPYECNECGKSYSQRSHLVVHHRIHTGLKPFECKDCGKCFSRSSHLYSHQRTHTGEKPYECHDCGKSFSQSSALIVHQRIHTGEKPYECCQCGKAFIRKNDLIKHQRIHVGEETYKCNQCGIIFSQNSPFIVHQIAHTGEQFLTCNQCGTALVNTSNLIGYQTNHIRENAY

SEQ ID NO: 15970 - protein, 542 aa, Homo Sapiens
MDDPRYGMCPLKGASGCPGAERSLLVQSYFEKGPLTFRDVAIEFSLEEWQCLDSAQQGLYRKVMLENYRNLVFLAGIALTKPDLITCLEQGKEPWNIKRHEMVAKPPVICSHFPQDLWAEQDIKDSFQEAILKKYGKYGHDNLQLQKGCKSVDECKVHKEHDNKLNQCLITTQSNIFQCDPSAKVFHTFSNSNRHKIRHTRKKPFKCKKCEKSFCMLLHLTQHKRFHITENSYQCKDCGKAFNWFSTLTTHRRIHTGEKPYKCEECGKAFNRSSHLTTHKIIHTGEKPYRCEECGKAFNRSSHLTTHKRIHTGVKPYKCTECGKAFNRSSHLTTHRIIHTGEKPYKCEECGKAFNQSSTLTTHKITHAGEKPYKCEECGKAFYRFSYLTKHKTSHTGEKFYKCEECGKGFNWSSALTKHKRIHTGEKPYKCEECGKAFNESSNLTTHKMIHTGEKPYKCDECGKAFNRSSQLTAHKMIHTGEKPYKCEECGKAFNRSSTLTKHKITHTGEKSYKWEECGKDFNQSLSLIKQNNSYWRETLQM

SEQ ID NO: 15971 - protein, 436 aa, Homo Sapiens
MDSVAFEDVAVNFTQEEWALLSPSQKNLYRDVTLETFRNLASVGIQWKDQDIENLYQNLGIKLRSLVERLCGRKEGNEHRETFSQIPDCHLNKKSQTGVKPCKCSVCGKVFLRHSFLDRHMRAHAGHKRSECGGEWRETPRKQKQHGKASISPSSGARRTVTPTRKRPYECKVCGKAFNSPNLFQIHQRTHTGKRSYKCREIVRAFTVSSFFRKHGKMHTGEKRYECKYCGKPIDYPSLFQIHVRTHTGEKPYKCKQCGKAFISAGYLRTHEIRSHALEKSHQCQECGKKLSCSSSLHRHERTHSGGKLYECQKCAKVFRCPTSLQAHERAHTGERPYECNKCGKTFNYPSCFRRHKKTHSGEKPYECTRCGKAFGWCSSLRRHEMTHTGEKPFDCKQCGKVFTFSNYLRLHERTHLAGRSQCFGRRQGDHLSPGV

SEQ ID NO: 15972 - protein, 1883 aa, Homo Sapiens
MPVGRIECPSSPSFPRDISHECRVCGVTEVGLSAYAKHISGQLHKDNVDAQEREDDGKGEEEEEDYFDKELIQLIKQRKEQSRQDEPSNSNQEINSDDRRPQWRREDRIPYQDRESYSQPAWHHRGPPQRDWKWEKDGFNNTRKNSFPHSLRNGGGPRGRSGWHKGVAGGSSTWFHNHSNSGGGWLSNSGAVDWNHNGTGRNSSWLSEGTGGFSSWHMNNSNGNWKSSVRSTNNWNYSGPGDKFQPGRNRNSNCQMEDMTMLWNKKSNKSNKYSHDRYNWQRQENDKLGTVATYRGPSEGFTSDKFPSEGLLDFNFEQLESQTTKQADTATSKVSGKNGSAAREKPRRWTPYPSQKTLDLQSGLKDITGNKSEMIEKPLFDFSLITTGIQEPQTDETRNSPTQKTQKEIHTGSLNHKASSDSAASFEVVRQCPTAEKPEQEHTPNKMPSLKSPLLPCPATKSLSQKQDPKNISKNTKTNFFSPGEHSNPSNKPTVEDNHGPYISKLRSSCPHVLKGNKSTFGSQKQSGDNLNDTLRKAKEVLQCHESLQNPLLSTSKSTRNYAKASRNVEESEKGSLKIEFQVHALEDESDGETSDTEKHGTKIGTLGSATTELLSGSTRTADEKEEDDRILKTSRELSTSPCNPIVRQKESELQMTSAASPHPGLLLDLKTSLEDAQVDDSIKSHVSYETEGFESASLDAELQKSDISQPSGPLLPELSKLGFPASLQRDLTRHISLKSKTGVHLPEPNLNSARRIRNISGHRKSETEKESGLKPTLRQILNASRRNVNWEQVIQQVTKKKQELGKGLPRFGIEMVPLVQNEQEALDLDGEPDLSSLEGFQWEGVSISSSPGLARKRSLSESSVIMDRAPSVYSFFSEEGTGKENEPQQMVSPSNSLRAGQSQKATMHLKQEVTPRAASLRTGERAENVATQRRHSAQLSSDHIIPLMHLAKDLNSQERSIPPSENQNSQESNGEGNCLSSSASSALAISSLADAATDSSCTSGAEQNDGQSIRKKRRATGDGSSPELPSLERKNKRRKIKGKKERSQVDQLLNISLREEELSKSLQCMDNNLLQARAALQTAYVEVQRLLMLKQQITMEMSALRTHRIQILQGLQETYEPSEHPDQVPCSLTRERRNSRSQTSIDAALLPTPFFPLFLEPPSSHVSPSPTGASLQITTSPTFQTHGSVPAPDSSVQIKQEPMSPEQDENVNAVPPSSACNVSKELLEANREISDSCPVYPVITARLSLPESTESFHEPSQELKFSVEQRNTRNRENSPSSQSAGLSSINKEGEEPTKGNSGSEACTSSFLRLSFASETPLEKEPHSPADQPEQQAESTLTSAETRGSKKKKKLRKKKSLRAAHVPENSDTEQDVLTVKPVRKVKAGKLIKGGKVTTSTWEDSRTGREQESVRDEPDSDSSLEVLEIPNPQLEVVAIDSSESGEEKPDSPSKKDIWNSTEQNPLETSRSGCDEVSSTSEIGTRYKDGIPVSVAETQTVISSIKGSKNSSEISSEPGDDDEPTEGSFEGHQAAVNAIQIFGNLLYTCSADKTVRVYNLVSRKCIGVFEGHTSKVNCLLVTQTSGKNAALYTGSSDHTIRCYNVKSRECVEQLQLEDRVLCLHSRWRILYAGLANGTVVTFNIKNNKRLEIFECHGPRAVSCLATAQEGARKLLVVGSYDCTISVRDARNGLLLRTLEGHSKTILCMKVVNDLVFSGSSDQSVHAHNIHTGELVRIYKGHNHAVTVVNILGKVMVTACLDKFVRVYELQSHDRLQVYGGHKDMIMCMTIHKSMIYTGCYDGSIQAVRLNLMQNYRCWWHGCSLIFGVVDHLKQHLLTDHTNPNFQTLKCRWKNCDAFFTARKGSKQDAAGHIERHAEDDSKIDS

SEQ ID NO: 15973 - protein, 783 aa, Homo Sapiens
MVAKPPVMSFHFAQDLWPEQNIKDSFQKVTLRRYGKCEYENLQLRKGCKHVDECTGHKGGHNTVNQCLTATPSKIFQCNKYVKVFDKFSNSNRYKRRHTGNKHFKCKECSKSFCVLSQLTQHRRIHTRVNSYKCEECGKAFNWFSTLTKHKRIHTGEKPYKCEECGKAFNQSSQLTRHKIIHTEEKPNKCEECGKAFKQASHLTIHKIIHTGEKPYKYEECGKVFSQSSHLTTQKILHTGENLYKCKECGKAFNLFSNLTNHKRIHAGEKPYKCKECGRAFNISSNLNKQEKIHTGGKLNKCEECDKAFNRSLKLTAHKKILMEEKPYKCEECGKVFNQFSTLTRHKIIHTGEKPYKCKECGKAFNQSSNLTEHKKIHTAEKSYKCEECGKAFNQHSNLINHRKIYSGEKPYKCEECGKAFNRSSTLTRHKKIHTGEKPYKCEECDRAFSQSSNLTEHKKIHTGEKPYKCEECGKAFNRFSTLTKHKRIHTGEKPYKCEECGKAFNQSYQLTRHKIVHTKEKLNKCEEFGKAFKQSSHRTIHKIIHTGEKPYKCEEHGKVFNQSSNLTTQKIIHTGENLYKFEEHGKAFNLFSNITNHKIIYTGEKPHKCEECGKAYNRFSNLTIHKRIHTGEKPYQCAECGKAFNCSSTLNRHKIIHTGEKPYKCKECGKAFNLSSTLTAHKKIHTGEKPYKCEECGKAFNQSSNLTTHKKIHTSEKPYKCEECGKSFNQFSSLNIHKIIHTGEKPYKCGDYGRAFNLSSNLTTHKKIHTGEKPYKCEYGKT

SEQ ID NO: 15974 - protein, 913 aa, Homo Sapiens
MTKFQEMVTFKDVAVVFTEEELGLLDSVQRKLYRDVMLENFRNLLLVAHQPFKPDLISQLEREEKLLMVETETPRDGCSGRKNQQKMESIQEVTVSYFSPKELSSRQTWQQSAGGLIRCQDFLKVFQGKNSQLQEQGNSLGQVWAGIPVQISEDKNYIFTHIGNGSNYIKSQGYPSWRAHHSWRKMYLKESHNYQCRCQQISMKNHFCKCDSVSWLSHHNDKLEVHRKENYSCHDCGEDIMKVSLLNQESIQTEEKPYPCTGYRKAFSNDSSSEVHQQFHLEGKPYTYSSCGKGCNYSSLLHIHQNIEREDDIENSHLKSYQRVHTEEKPCKCGEYGENFNHCSPLNTYELIHTGEMSYRHNIYEKAFSHSLDLNSIFRVHTRDEPHEYEENENVFNQSSCLQVHQKIHTEEKLYTDIEYGKSFICSSNLDIQHRVHMEENSYNSEECGNGFSLASHFQDLQIVHTKEQPYKRYVCSNSFSHNLYLQGHPKIHIGEKPRKEHGNGFNWSSKLKDHQRVHTGQKPYKCNICGKGFNHRSVLNVHQRVHTGEKPYKCEECDKGFSRSSYLQAHQRVHTGEKPYKCEECGKGFSRNSYLQGHQRVHTGEKPYKCEECGKGFSRSSHLQGHQRVHTGEKPFKCEECGKGFSWSFNLQIHQRVHTGEKPYKCEECGKGFSKASTLLAHQRVHTGEKPYQCDECGKSFSQRSYLQSHQSVHSGERPYICEVCGKGFSQRAYLQGHQRVHTRVKPYKCEMCGKGFSQSSRLEAHRRVHTGGKPYKCEVCTKGFSESSRLQAHQRVHVEGRPYKCEQCGKGFSGYSSLQAHHRVHTGEKPYKCEVCGKGFSQRSNLQAHQRVHTGEKPYKCDACGKGFRWSSGLLIHQRVHSSDKFYKSEDYGKDYPSSENLHRNEDSVLF

SEQ ID NO: 15975 - protein, 417 aa, Homo Sapiens
MSQDSVTFADVAVNFTKEEWTLLDPAQRNLYRDVMLENSRNLAFIDWATPCKTKDATPQPDILPKRTFPEANRVCLTSISSQHSTLREDWRCPKTEEPHRQGVNNVKPPAVAPEKDESPVSICEDHEMRNHSKPTCRLVPSQGDSIRQCILTRDSSIFKYNPVLNDSQKTHENNEDDGVLGWNIQWVPCGRKTELKSSTWTGSQNTVHHIRDEIDTGANRHQRNPFGKAFREDGSLRAHNTHGREKMYDFTQCENTSRNNSIHAMQMQLYTAETNKKDCQTGATSANAPNSGSHKSHCTGEKTHKCPECGRAFFYQSFLMRHMKIHTGEKPYECGKCGKAFRYSLHLNKHLRKHVVQKKPYECEECGKVIRESSKYTHIRSHTGEKPYKCKTCGKDFAKSSGLKKHLKTHKDEKPCE

SEQ ID NO: 15976 - protein, 483 aa, Homo Sapiens
MKRHEMVAKHLVMFYYFAQHLWPEQNIRDSFQKVTLRRYRKCGYENLQLRKGCKSVVECKQHKGDYSGLNQCLKTTLSKIFQCNKYVEVFHKISNSNRHKMRHTENKHFKCKECRKTFCMLSHLTQHKRIQTRVNFYKCEAYGRAFNWSSTLNKHKRIHTGEKPYKCKECGKAFNQTSHLIRHKRIHTEEKPYKCEECGKAFNQSSTLTTHNIIHTGEIPYKCEKCVRAFNQASKLTEHKLIHTGEKRYECEECGKAFNRSSKLTEHKYIHTGEKLYKCEECGKAFNQSSTLTTHKRIHSGEKPYKCEECGKAFKQFSNLTDHKKIHTGEKPYKCEECGKAFNQLSNLTRHKVIHTGEKPYKCGECGKAFNQSSALNTHKIIHTGENPHKCRESGKVFHLSSKLSTCKKIHTGEKLYKCEECGKAFNRSSTLIGHKRIHTGEKPYKCEECGKAFNQSSTLTTHKIIHTEEKQYKCDECGKAST

SEQ ID NO: 15977 - protein, 697 aa, Homo Sapiens
MNKSLGPVSFKDVAVDFTQEEWQQLDPEQKITYRDVMLENYSNLVSVGYHIIKPDVISKLEQGEEPWIVEGEFLLQSYPDEVWQTDDLIERIQEEENKPSRQTVFIETLIEERGNVPGKTFDVETNPVPSRKIAYKNSLCDSCEKCLTSVSEYISSDGSYARMKADECSGCGKSLLHIKLEKTHPGDQAYEFNQNGEPYTLNEESLYQKIRILEKPFEYIECQKAFQKDTVFVNHMEEKPYKWNGSEIAFLQMSDLTVHQTSHMEMKPYECSECGKSFCKKSKFIIHQRTHTGEKPYECNQCGKSFCQKGTLTVHQRTHTGEKPYECNECGKNFYQKLHLIQHQRTHSGEKPYECSYCGKSFCQKTHLTQHQRTHSGERPYVCHDCGKTFSQKSALNDHQKIHTGVKLYKCSECGKCFCRKSTLTTHLRTHTGEKPYECNECGKFFSRLSYLTVHYRTHSGEKPYECNECGKTFYLNSALMRHQRVHTGEKPYECNECGKLFSQLSYLTIHHRTHSGVKPYECSECGKTFYQNSALCRHRRIHKGEKPYECYICGKFFSQMSYLTIHHRIHSGEKPYECSECGKTFCQNSALNRHQRTHTGEKAYECYECGKCFSQMSYLTIHHRIHSGEKPFECNECGKAFSRMSYLTVHYRTHSGEKPYECTECGKKFYHKSAFNSHQRIHRRGNMNVIDVGRLL

SEQ ID NO: 15978 - protein, 390 aa, Homo Sapiens
MAEIHNGGELCDFMENGEIFSEHSCLNAHMGTENTGDTYDCDEYGENFPMLHNSAPAGETLSVLNQCRKAFSLPPNVHQRTWIGDKSFEYSDCEEAFVDQSHLQANRITHNGETLYEQKQCGRAFTYSTSHAVSVKMHTVEKPYECKECGKFFRYSSYLNSHMRTHTGEKPYECKECGKCFTVSSHLVEHVRIHTGEKPYQCKECGRAFAGRSGLTKHVRIHTGEKPYECNECGKAYNRFYLLTEHFKTHTEEKPFECKVCGKSFRSSSCLKNHFRIHTGIKPYKCKECGKAFTVSSSLHNHVKIHTGEKPYECKDCGKAFATSSQLIEHIRTHTGEKPYICKECGKTFRASSHLQKHVRIHTGEKPYICNECGKAYNRFYLLTKHLKTH

SEQ ID NO: 15979 - protein, 351 aa, Homo Sapiens
MSGHPGSWEMNSVAFEDVAVNFTQEEWALLDPSQKNLYRDVMQETFRNLASIGNKGEDQSIEDQYKNSSRNLRHIISHSGNNPYGCEECGKKPCTCKQCQKTSLSVTRVHRDTVMHTGNGHYGCTICEKVFNIPSSFQIHQRNHTGEKPYECMECGKALGFSRSLNRHKRIHTGEKRYECKQCGKAFSRSSHLRDHERTHTGEKPYECKHCGKAFRYSNCLHYHERTHTGEKPYVCMECGKAFSCLSSLQGHIKAHAGEEPYPCKQCGKAFRYASSLQKHEKTHIAQKPYVCNNCGKGFRCSSSLRDHERTHTGEKPYECQKCGKAFSRASTLWKHKKTHTGEKPYKCKKM

SEQ ID NO: 15980 - protein, 623 aa, Homo Sapiens
MEAEETMECLQEFPEHHKMILDRLNEQREQDRFTDITLIVDGHHFKAHKAVLAACSKFFYKFFQEFTQEPLVEIEGVSKMAFRHLIEFTYTAKLMIQGEEEANDVWKAAEFLQMLEAIKALEVRNKENSAPLEENTTGKNEAKKRKIAETSNVITESLPSAESEPVEIEVEIAEGTIEVEDEGIETLEEVASAKQSVKYIQSTGSSDDSALALLADITSKYRQGDRKGQIKEDGCPSDPTSKQVEGIEIVELQLSHVKDLFHCEKCNRSFKLFYHFKEHMKSHSTESFKCEICNKRYLRESAWKQHLNCYHLEEGGVSKKQRTGKKIHVCQYCEKQFDHFGHFKEHLRKHTGEKPFECPNCHERFARNSTLKCHLTACQTGVGAKKGRKKLYECQVCNSVFNSWDQFKDHLVIHTGDKPNHCTLCDLWFMQGNELRRHLSDAHNISERLVTEEVLSVETRVQTEPVTSMTIIEQVGKVHVLPLLQVQVDSAQVTVEQVHPDLLQDSQVHDSHMSELPEQVQVSYLEVGRIQTEEGTEVHVEELHVERVNQMPVEVQTELLEADLDHVTPEIMNQEERESSQADAAEAAREDHEDAEDLETKPTVDSEAEKAENEDRTALPVLE

SEQ ID NO: 15981 - protein, 706 aa, Homo Sapiens
MALPSPQVLMGLPALLMGPAQHTSWPCGSAVPTLKSMVTFEDVAVYFSQEEWELLDAAQRHLYHSVMLENLELVTSLGSWHGVEGEGAHPKQNVSVEVLQVRIPNADPSTKKANSCDMCGPFLKDILHLAEHQGTQSEEKPYTCGACGRDFWLNANLHQHQKEHSGGKPFRWYKDRDALMKSSKVHLSENPFTCREGGKVILGSCDLLQLQAVDSGQKPYSNLGQLPEVCTTQKLFECSNCGKAFLKSSTLPNHLRTHSEEIPFTCPTGGNFLEEKSILGNKKFHTGEIPHVCKECGKAFSHSSKLRKHQKFHTEVKYYECIACGKTFNHKLTFVHHQRIHSGERPYECDECGKAFSNRSHLIRHEKVHTGERPFECLKCGRAFSQSSNFLRHQKVHTQVRPYECSQCGKSFSRSSALIQHWRVHTGERPYECSECGRAFNNNSNLAQHQKVHTGERPFECSECGRDFSQSSHLLRHQKVHTGERPFECCDCGKAFSNSSTLIQHQKVHTGQRPYECSECRKSFSRSSSLIQHWRIHTGEKPYECSECGKAFAHSSTLIEHWRVHTKERPYECNECGKFFSQNSILIKHQKVHTGEKPYKCSECGKFFSRKSSLICHWRVHTGERPYECSECGRAFSSNSHLVRHQRVHTQERPYECIQCGKAFSERSTLVRHQKVHTRERTYECSQCGKLFSHLCNLAQHKKIHT

SEQ ID NO: 15982 - protein, 654 aa, Homo Sapiens
MAFRDVAVDFTQDEWRLLSPAQRTLYREVMLENYSNLVSLGISFSKPELITQLEQGKETWREEKKCSPATCPADPEPELYLDPFCPPGFSSQKFPMQHVLCNHPPWIFTCLCAEGNIQPGDPGPGDQEKQQQASEGRPWSDQAEGPEGEGAMPLFGRTKKRTLGAFSRPPQRQPVSSRNGLRGVELEASPAQSGNPEETDKLLKRIEVLGFGTVNCGECGLSFSKMTNLLSHQRIHSGEKPYVCGVCEKGFSLKKSLARHQKAHSGEKPIVCRECGRGFNRKSTLIIHERTHSGEKPYMCSECGRGFSQKSNLIIHQRTHSGEKPYVCRECGKGFSQKSAVVRHQRTHLEEKTIVCSDCGLGFSDRSNLISHQRTHSGEKPYACKECGRCFRQRTTLVNHQRTHSKEKPYVCGVCGHSFSQNSTLISHRRTHTGEKPYVCGVCGRGFSLKSHLNRHQNIHSGEKPIVCKDCGRGFSQQSNLIRHQRTHSGEKPMVCGECGRGFSQKSNLVAHQRTHSGERPYVCRECGRGFSHQAGLIRHKRKHSREKPYMCRQCGLGFGNKSALITHKRAHSEEKPCVCRECGQGFLQKSHLTLHQMTHTGEKPYVCKTCGRGFSLKSHLSRHRKTTSVHHRLPVQPDPEPCAGQPSDSLYSL

SEQ ID NO: 15983 - protein, 427 aa, Homo Sapiens
MTLVTAGGAWTGPGCWHEVKDEESSSEQSISIAVSHVNTSKAGLPAQTALPCDICGPILKDILHLDEHQGTHHGLKLHTCGACGRQFWFSANLHQYQKCYSIEQPLRRDKSEASIVKNCTVSKEPHPSEKPFTCKEEQKNFQATLGGCQQKAIHSKRKTHRSTESGDAFHGEQMHYKCSECGKAFSRKDTLVQHQRIHSGEKPYECSECGKAFSRKATLVQHQRIHTGERPYECSECGKTFSRKDNLTQHKRIHTGEMPYKCNECGKYFSHHSNLIVHQRVHNGARPYKCSDCGKVFRHKSTLVQHESIHTGENPYDCSDCGKSFGHKYTLIKHQRIHTESKPFECIECGKFFSRSSDYIAHQRVHTGERPFVCSKCGKDFIRTSHLVRHQRVHTGERPYECSECGKAYSLSSHLNRHQKVHTAGRL

SEQ ID NO: 15984 - protein, 658 aa, Homo Sapiens
MTPGVRVSTDPEQVTFEDVVVGFSQEEWGQLKPAQRTLYRDVMLDTFRLLVSVGHWLPKPNVISLLEQEAELWAVESRLPQGVYPDLETRPKVKLSVLKQGISEEISNSVILVERFLWDGLWYCRGEDTEGHWEWSCESLESLAVPVAFTPVKTPVLEQWQRNGFGENISLNPDLPHQPMTPERQSPHTWGTRGKREKPDLNVLQKTCVKEKPYKCQECGKAFSHSSALIEHHRTHTGERPYECHECLKGFRNSSALTKHQRIHTGEKPYKCTQCGRTFNQIAPLIQHQRTHTGEKPYECSECGKSFSFRSSFSQHERTHTGEKPYECSECGKAFRQSIHLTQHLRIHTGEKPYQCGECGKAFSHSSSLTKHQRIHTGEKPYECHECGKAFTQITPLIQHQRTHTGEKPYECGECGKAFSQSTLLTEHRRIHTGEKPYGCNECGKTFSHSSSLSQHERTHTGEKPYECSQCGKAFRQSTHLTQHQRIHTGEKPYECNDCGKAFSHSSSLTKHQRIHTGEKPYECNQCGRAFSQLAPLIQHQRIHTGEKPYECNQCGRAFSQSSLLIEHQRIHTKEKPYGCNECGKSFSHSSSLSQHERTHTGEKPYECHDCGKSFRQSTHLTQHRRIHTGEKPYACRDCGKAFTHSSSLTKHQRTHTG

SEQ ID NO: 15985 - protein, 540 aa, Homo Sapiens
MDSVAFEDVDVNFTQEEWALLDPSQKNLYRDVMWETMRNLASIGKKWKDQNIKDHYKHRGRNLRSHMLERLYQTKDGSQRGGIFSQFANQNLSKKIPGVKLCESIVYGEVSMGQSSLNRHIKDHSGHEPKEYQEYGEKPDTRNQCWKPFSSHHSFRTHEIIHTGEKLYDCKECGKTFFSLKRIRRHIITHSGYTPYKCKVCGKAFDYPSRFRTHERSHTGEKPYECQECGKAFTCITSVRRHMIKHTGDGPYKCKVCGKPFHSLSSFQVHERIHTGEKPFKCKQCGKAFSCSPTLRIHERTHTGEKPYECKQCGKAFSYLPSLRLHERIHTGEKPFVCKQCGKAFRSASTFQIHERTHTGEKPYECKECGEAFSCIPSMRRHMIKHTGEGPYKCKVCGKPFHSLSPFRIHERTHTGEKPYVCKHCGKAFVSSTSIRIHERTHTGEKPYECKQCGKAFSYLNSFRTHEMIHTGEKPFECKRCGKAFRSSSSFRLHERTHTGQKPYHCKECGKAYSCRASFQRHMLTHAEDGPPYKCMWESL

SEQ ID NO: 15986 - protein, 207 aa, Homo Sapiens
MNVARFLVEKHTLHVIIDFILSKVSNQQSNLAQHQRVYTGEKPYKCNEWGKALSGKSSLFYHQAIHGVGKLCKCNDCHKVFSNATTIANHWRIHNEDRSYKCNKCGKIFRHRSYLAVYQRTHTGEKPYKYHDCGKVFSQASSYAKHRRIHTGEKPHKCDDCGKVLTSRSHLIRHQRIHTGQKSYKCLKCGKVFSLWALHAEHQKIHF

SEQ ID NO: 15987 - protein, 262 aa, Homo Sapiens
MKRHEMVVAKHSALCSRFAQDLWLEQNIKDSFQKVTLSRYGKYGHKNLQLRKGCKSVDECKGHQGGFNGLNQCLKITTSKIFQCNKYVKVMHKFSNSNRHKIRHTENKHFRCKECDKSLCMLSRLTQHKKIHTRENFYKCEECGKTFNWSTNLSKPKKIHTGEKPYKCEVCGKAFHQSSILTKHKIIRTGEKPYKCAHCGKAFKQSSHLTRHKIIHTEEKPYKCEQCGKVFKQSPTLTKHQIIYTGEEPYKCEECGKAFNLS

SEQ ID NO: 15988 - protein, 642 aa, Homo Sapiens
MDSVSFEDVAVNFTLEEWALLDSSQKKLYEDVMQETFKNLVCLGKKWEDQDIEDDHRNQGKNRRCHMVERLCESRRGSKCGETTSQMPNVNINKETFTGAKPHECSFCGRDFIHHSSLNRHMRSHTGQKPNEYQEYEKQPCKCKAVGKTFSYHHCFRKHERTHTGVKPYECKQCGKAFIYYQPFQRHERTHAGQKPYECKQCGKTFIYYQSFQKHAHTGKKPYECKQCGKAFICYQSFQRHKRTHTGEKPYECKQCGKAFSCPTYFRTHERTHTGEKPYKCKECGKAFSFLSSFRRHKRTHSGEKPYECKECGKAFFYSASFRAHVIIHTGARPYKCKECGKAFNSSNSCRVHERTHIGEKPYECKRCGKSFSWSISLRLHERTHTGEKPYECKQCHKTFSFSSSLREHETTHTGEKPYECKQCGKTFSFSSSLQRHERTHNAEKPYECKQCGKAFRCSSYFRIHERSHTGEKPYECKQCGKVFIRSSSFRLHERTHTGEKPYECKLCGKTFSFSSSLREHEKIHTGNKPFECKQCGKAFLRSSQIRLHERTHTGEKPYQCKQCGKAFISSSKFRMHERTHTGEKPYRCKQCGKAFRFSSSVRIHERSHTGEKPYECKQCGKAFISSSHFRLHERTHMGEKV

SEQ ID NO: 15989 - protein, 457 aa, Homo Sapiens
MSQGSVTFRDVAIDFSQEEWKWLQPAQRDLYRCVMLENYGHLVSLGLSISKPDVVSLLEQGKEPWLGKREVKRDLFSVSESSGEIKDFSPKNVIYDDSSQYLIMERILSQGPVYSSFKGGWKCKDHTEMLQENQGCIRKVTVSHQEALAQHMNISTVERPYGCHECGKTFGRRFSLVLHQRTHTGEKPYACKECGKTFSQISNLVKHQMIHTGKKPHECKDCNKTFSYLSFLIEHQRTHTGEKPYECTECGKAFSRASNLTRHQRIHIGKKQYICRKCGKAFSSGSELIRHQITHTGEKPYECIECGKAFRRFSHLTRHQSIHTTKTPYECNECRKAFRCHSFLIKHQRIHAGEKLYECDECGKVFTWHASLIQHTKSHTGEKPYACAECDKAFSRSFSLILHQRTHTGEKPYVCKVCNKSFSWSSNLAKHQRTHTLDNPYEYENSFNYHSFLTEHQ

SEQ ID NO: 15990 - protein, 474 aa, Homo Sapiens
MELLTFRDVAIEFSPEEWKCLDPDQQNLYRDVMLENYRNLVSLGVAISNPDLVTCLEQRKEPYNVKIHKIVARPPAMCSHFTQDHWPVQGIEDSFHKLILRRYEKCGHDNLQLRKGCKSLNECKLQKGGYNEFNECLSTTQSKILQCKASVKVVSKFSNSNKRKTRHTGEKHFKECGKSFQKFSHLTQHKVIHAGEKPYTCEECGKAFKWSLIFNEHKRIHTGEKPFTCEECGSIFTTSSHFAKHKIIHTGEKPYKCEECGKAFNRFTTLTKHKRIHAGEKPITCEECRKIFTSSSNFAKHKRIHTGEKPYKCEECGKAFNRSTTLTKHKRIHTGEKPYTCEECGKAFRQSSKLNEHKKVHTGERPYKCDECGKAFGRSRVLNEHKKIHTGEKPYKCEECGKAFRRSTDRSQHKKIHSADKPYKCKECDKAFKQFSLLSQHKKIHTVDKPYKCKDCDKAFKRFSHLNKHKKIHT

SEQ ID NO: 15991 - protein, 1687 aa, Homo Sapiens
MTDPLLDSQPASSTGEMDGLCPELLLIPPPLSNRGILGPVQSPCPSRDPAPIPTEPGCLLVEATATEEGPGNMEIIVETVAGTLTPGAPGETPAPKLPPGEREPSQEAGTPLPGQETAEEENVEKEEKSDTQKDSQKAVDKGQGAQRLEGDVVSGTESLFKTHMCPECKRCFKKRTHLVEHLHLHFPDPSLQCPNCQKFFTSKSKLKTHLLRELGEKAHHCPLCHYSAVERNALNRHMASMHEDISNFYSDTYACPVCREEFRLSQALKEHLKSHTAAAAAEPLPLRCFQEGCSYAAPDRKAFIKHLKETHGVRAVECRHHSCPMLFATAEAMEAHHKSHYAFHCPHCDFACSNKHLFRKHKKQGHPGSEELRCTFCPFATFNPVAYQDHVGKMHAHEKIHQCPECNFATAHKRVLIRHMLLHTGEKPHKCELCDFTCRDVSYLSKHMLTHSNTKDYMCTECGYVTKWKHYLRVHMRKHAGDLRYQCNQCSYRCHRADQLSSHKLRHQGKSLMCEVCAFACKRKYELQKHMASQHHPGTPAPLYPCHYCSYQSRHKQAVLSHENCKHTRLREFHCALCDYRTFSNTTLLFHKRKAHGYVPGDQAWQLRYASQEPEGAMQGPTPPPDSEPSNQLSARPEGPGHEPGTVVDPSLDQALPEMSEEVNTGRQEGSEAPHGGDLGGSPSPAEVEEGSCTLHLEALGVELESVTEPPLEEVTETAPMEFRPLGLEGPDGLEGPELSSFEGIGTSDLSAEENPLLEKPVSEPSTNPPSLEEAPNNWVGTFKTTPPAETAPLPPLPESESLLKALRRQDKEQAEALVLEGRVQMVVIQGEGRAFRCPHCPFITRREKALNLHSRTGCQGRREPLLCPECGASFKQQRGLSTHLLKKCPVLLRKNKGLPRPDSPIPLQPVLPGTQASEDTESGKPPPASQEAELLLPKDAPLELPREPEETEEPLATVSGSPVPPAGNSLPTEAPKKHCFDPVPPAGNSSPTEAPKKHHLDPVPPAGNSSPTEALKKHRFEQGKFHCNSCPFLCSRLSSITSHVAEGCRGGRGGGGKRGTPQTQPDVSPLSNGDSAPPKNGSTESSSGDGDTVLVQKQKGARFSCPTCPFSCQQERALRTHQIRGCPLEESGELHCSLCPFTAPAATALRLHQKRRHPTAAPARGPRPHLQCGDCGFTCKQSRCMQQHRRLKHEGVKPHQCPFCDFSTTRRYRLEAHQSRHTGIGRIPCSSCPQTFGTNSKLRLHRLRVHDKTPTHFCPLCDYSGYLRHDITRHVNSCHQGTPAFACSQCEAQFSSETALKQHALRRHPEPAQPAPGSPAETTEGPLHCSRCGLLCPSPASLRGHTRKQHPRLECGACQEAFPSRLALDEHRRQQHFSHRCQLCDFAARERVGLVKHYLEQHEETSAAVAASDGDGDAGQPPLHCPFCDFTCRHQLVLDHHVKGHGGTRLYKCTDCAYSTKNRQKITWHSRIHTGEKPYHCHLCPYACADPSRLKYHMRIHKEERKYLCPECGYKCKWVNQLKYHMTKHTGLKPYQCPECEYCTNRADALRVHQETRHREARAFMCEQCGKAFKTRFLLRTHLRKHSEAKPYVCNVCHRAFRWAAGLRHHALTHTDRHPFFCRLCNYKAKQKFQVVKHVRRHHPDQADPNQGVGKDPTTPTVHLHDVQLEDPSPPAPAAPHTGPEG

SEQ ID NO: 15992 - protein, 638 aa, Homo Sapiens
MLLAQINRDSQGMTEFPGGGMEAQHVTLCLTEAVTVADGDNLENMEGVSLQAVTLADGSTAYIQHNSKDAKLIDGQVIQLEDGSAAYVQHVPIPKSTGDSLRLEDGQAVQLEDGTTAFIHHTSKDSYDQSALQAVQLEDGTTAYIHHAVQVPQSDTILAIQADGTVAGLHTGDATIDPDTISALEQYAAKVSIDGSESVAGTGMIGENEQEKKMQIVLQGHATRVTAKSQQSGEKAFRCEYDGCGKLYTTAHHLKVHERSHTGDRPYQCEHAGCGKAFATGYGLKSHVRTHTGEKPYRCSEDNCTKSFKTSGDLQKHIRTHTGERPFKCPFEGCGRSFTTSNIRKVHVRTHTGERPYYCTEPGCGRAFASATNYKNHVRIHTGEKPYVCTVPGCDKRFTEYSSLYKHHVVHTHSKPYNCNHCGKTYKQISTLAMHKRTAHNDTEPIEEEQEAFFEPPPGQGEDVLKGSQITYVTGVEGDDVVSTQVATVTQSGLSQQVTLISQDGTQHVNISQADMQAIGNTITMVTQDGTPITVPAHDAVISSAGTHSVAMVTAEGTEGEQVAIVAQDLAAFHTASSEMGHQQHSHHLVTTETRPLTLVATSNGTQIAVQLGEQPSLEEAIRIASRIQQGETPGLDD

SEQ ID NO: 15993 - protein, 292 aa, Homo Sapiens
MSHLSQQRIYSGENPFACKVCGKVFSHKSNLTEHEHFHTREKPFECNECGKAFSQKQYVIKHQNTHTGEKLFECNECGKSFSQKENLLTHQKIHTGEKPFECKDCGKAFIQKSNLIRHQRTHTGEKPFVCKECGKTFSGKSNLTEHEKIHIGEKPFKCSECGTAFGQKKYLIKHQNIHTGEKPYECNECGKAFSQRTSLIVHVRIHSGDKPYECNVCGKAFSQSSSLTVHVRSHTGEKPYGCNECGKAFSQFSTLALHLRIHTGKKPYQCSECGKAFSQKSHHIRHQKIHTH

SEQ ID NO: 15994 - protein, 794 aa, Homo Sapiens
MNIDDKLEGLFLKCGGIDEMQSSRTMVVMGGVSGQSTVSGELQDSVLQDRSMPHQEILAADEVLQESEMRQQDMISHDELMVHEETVKNDEEQMETHERLPQGLQYALNVPISVKQEITFTDVSEQLMRDKKQIREPVDLQKKKKRKQRSPAKILTINEDGSLGLKTPKSHVCEHCNAAFRTNYHLQRHVFIHTGEKPFQCSQCDMRFIQKYLLQRHEKIHTGEKPFRCDECGMRFIQKYHMERHKRTHSGEKPYQCEYCLQYFSRTDRVLKHKRMCHENHDKKLNRCAIKGGLLTSEEDSGFSTSPKDNSLPKKKRQKTEKKSSGMDKESALDKSDLKKDKNDYLPLYSSSTKVKDEYMVAEYAVEMPHSSVGGSHLEDASGEIHPPKLVLKKINSKRSLKQPLEQNQTISPLSTYEESKVSKYAFELVDKQALLDSEGNADIDQVDNLQEGPSKPVHSSTNYDDAMQFLKKKRYLQAASNNSREYALNVGTIASQPSVTQAAVASVIDESTTASILESQALNVEIKSNHDKNVIPDEVLQTLLDHYSHKANGQHEISFSVADTEVTSSISINSSEVPEVTPSENVGSSSQASSSDKANMLQEYSKFLQQALDRTSQNDAYLNSPSLNFVTDNQTLPNQPAFSSIDKQVYATMPINSFRSGMNSPLRTTPDKSHFGLIVGDSQHSFPFSGDETNHASATSTQDFLDQVTSQKKAEAQPVHQAYQMSSFEQPFRAPYHGSRAGIATQFSTANGQVNLRGPGTSAEFSEFPLVNVNDNRAGMTSSPDATTGQTFG

SEQ ID NO: 15995 - protein, 437 aa, Homo Sapiens
MAAATLRTPTQGTVTFEDVAVHFSWEEWGLLDEAQRCLYRDVMLENLALLTSLDVHHQKQHLGEKHFRSNVGRALFVKTCTFHVSGEPSTCREVGKDFLAKLGFLHQQAAHTGEQSNSKSDGGAISHRGKTHYNCGEHTKAFSGKHTLVQQQRTLTTERCYICSECGKSFSKSYSLNDHWRLHTGEKPYECRECGKSFRQSSSLIQHRRVHTAVRPHECDECGKLFSNKSNLIKHRRVHTGERPYECSECGKSFSQRSALLQHRGVHTGERPYECSECGKFFTYHSSLIKHQKVHSGSRPYECSECGKSFSQNSSLIEHHRVHTGERPYKCSECGKSFSQRSALLQHRGVHTGERPYECSECGKFFPYSSSLRKHQRVHTGSRPYECSECGKSFTQNSGLIKHRRVHTGEKPYECTECGKSFSHNSSLIKHQRIHSR

SEQ ID NO: 15996 - protein, 538 aa, Homo Sapiens
MTTFKEAVTFKDVAVVFTEEELGLLDPAQRKLYRDVMLENFRNLLSVGHQPFHQDTCHFLREEKFWMMGTATQREGNSGGKIQTELESVPEAGAHEEWSCQQIWEQIAKDLTRSQDSIINNSQFFENGDVPSQVEAGLPTIHTGQKPSQGGKCKQSISDVPIFDLPQQLYSEEKSYTCDECGKSICYISALHVHQRVHVGEKLFMCDVCGKEFSQSSHLQTHQRVHTGEKPFKCEQCGKGFSRRSALNVHRKLHTGEKPYICEACGKAFIHDSQLKEHKRIHTGEKPFKCDICGKTFYFRSRLKSHSMVHTGEKPFRCDTCDKSFHQRSALNRHCMVHTGEKPYRCEQCGKGFIGRLDFYKHQVVHTGEKPYNCKECGKSFRWSSCLLNHQRVHSGEKSFKCEECGKGFYTNSQLSSHQRSHSGEKPYKCEECGKGYVTKFNLDLHQRVHTGERPYNCKECGKNFSRASSILNHKRLHCQKKPFKCEDCGKRLVHRTYRKDQPRDYSGENPSKCEDCGRRYKRRLNLDILLSLFLNDT

SEQ ID NO: 15997 - protein, 506 aa, Homo Sapiens
MPANGTSPQRFPALIPGEPGRSFEGSVSFEDVAVDFTRQEWHRLDPAQRTMHKDVMLETYSNLASVGLCVAKPEMIFKLERGEELWILEEESSGHGYSGSLSLLCGNGSVGDNALRHDNDLLHHQKIQTLDQNVEYNGCRKAFHEKTGFVRRKRTPRGDKNFECHECGKAYCRKSNLVEHLRIHTGERPYECGECAKTFSARSYLIAHQKTHTGERPFECNECGKSFGRKSQLILHTRTHTGERPYECTECGKTFSEKATLTIHQRTHTGEKPYECSECGKTFRVKISLTQHHRTHTGEKPYECGECGKNFRAKKSLNQHQRIHTGEKPYECGECGKFFRMKMTLNNHQRTHTGEKPYQCNECGKSFRVHSSLGIHQRIHTGEKPYECNECGNAFYVKARLIEHQRMHSGEKPYECSECGKIFSMKKSLCQHRRTHTGEKPYECSECGNAFYVKVRLIEHQRIHTGERPFECQECGKAFCRKAHLTEHQRTHIGWSWRCTMKKASH

SEQ ID NO: 15998 - protein, 682 aa, Homo Sapiens
MPSLRTRREEAEMELSVPGPSPWTPAAQARVRDAPAVTHPGSAACGTPCCSDTELEAICPHYQQPDCDTRTEDKEFLHKEDIHEDLESQAEISENYAGDVSQVPELGDLCDDVSERDWGVPEGRRLPQSLSQEGDFTPAAMGLLRGPLGEKDLDCNGFDSRFSLSPNLMACQEIPTEERPHPYDMGGQSFQHSVDLTGHEGVPTAESPLICNECGKTFQGNPDLIQRQIVHTGEASFMCDDCGKTFSQNSVLKNRHRSHMSEKAYQCSECGKAFRGHSDFSRHQSHHSSERPYMCNECGKAFSQNSSLKKHQKSHMSEKPYECNECGKAFRRSSNLIQHQRIHSGEKPYVCSECGKAFRRSSNLIKHHRTHTGEKPFECGECGKAFSQSAHLRKHQRVHTGEKPYECNDCGKPFSRVSNLIKHHRVHTGEKPYKCSDCGKAFSQSSSLIQHRRIHTGEKPHVCNVCGKAFSYSSVLRKHQIIHTGEKPYRCSVCGKAFSHSSALIQHQGVHTGDKPYACHECGKTFGRSSNLILHQRVHTGEKPYECTECGKTFSQSSTLIQHQRIHNGLKPHECNQCGKAFNRSSNLIHHQKVHTGEKPYTCVECGKGFSQSSHLIQHQIIHTGERPYKCSECGKAFSQRSVLIQHQRIHTGVKPYDCAACGKAFSQRSKLIKHQLIHTRE

SEQ ID NO: 15999 - protein, 818 aa, Homo Sapiens
MALTQVRLTFRDVAIEFSQEEWKCLDPAQRILYRDVMLENYWNLVSLGLCHFDMNIISMLEEGKEPWTVKSCVKIARKPRTPECVKGVVTDIPPKCTIKDLLPKEKSSTEAVFHTVVLERHESPDIEDFSFKEPQKNVHDFECQWRDDTGNYKGVLMAQKEGKRDQRDRRDIENKLMNNQLGVSFHSHLPELQLFQGEGKMYECNQVEKSTNNGSSVSPLQQIPSSVQTHRSKKYHELNHFSLLTQRRKANSCGKPYKCNECGKAFTQNSNLTSHRRIHSGEKPYKCSECGKTFTVRSNLTIHQVIHTGEKPYKCHECGKVFRHNSYLATHRRIHTGEKPYKCNECGKAFRGHSNLTTHQLIHTGEKPFKCNECGKLFTQNSHLISHWRIHTGEKPYKCNECGKAFSVRSSLAIHQTIHTGEKPYKCNECGKVFRYNSYLGRHRRVHTGEKPYKCNECGKAFSMHSNLATHQVIHTGTKPFKCNECSKVFTQNSQLANHRRIHTGEKPYKCNECGKAFSVRSSLTTHQAIHSGEKPYKCIECGKSFTQKSHLRSHRGIHSGEKPYKCNECGKVFAQTSQLARHWRVHTGEKPYKCNDCGRAFSDRSSLTFHQAIHTGEKPYKCHECGKVFRHNSYLATHRRIHTGEKPYKCNECGKAFSMHSNLTTHKVIHTGEKPYKCNQCGKVFTQNSHLANHQRTHTGEKPYRCNECGKAFSVRSSLTTHQAIHTGKKPYKCNECGKVFTQNAHLANHRRIHTGEKPYRCTECGKAFRVRSSLTTHMAIHTGEKRYKCNECGKVFRQSSNLASHHRMHTGEKPYK

SEQ ID NO: 16000 - protein, 485 aa, Homo Sapiens
MATEPKKAAAQNSPEDEGLLIVKIEEEEFIHGQDTCLQRSELLKQELCRQLFRQFCYQDSPGPREALSRLRELCCQWLKPEIHTKEQILELLVLEQFLTILPGDLQAWVHEHYPESGEEAVTILEDLERGTDEAVLQVQAHEHGQEIFQKKVSPPGPALNVKLQPVETKAHFDSSEPQLLWDCDNESENSRSMPKLEIFEKIESQRIISGRISGYISEASGESQDICKSAGRVKRQWEKESGESQRLSSAQDEGFGKILTHKNTVRGEIISHDGCERRLNLNSNEFTHQKSCKHGTCDQSFKWNSDFINHQIIYAGEKNHQYGKSFKSPKLAKHAAVFSGDKTHQCNECGKAFRHSSKLARHQRIHTGERCYECNECGKSFAESSDLTRHRRIHTGERPFGCKECGRAFNLNSHLIRHQRIHTREKPYECSECGKTFRVSSHLIRHFRIHTGEKPYECSECGRAFSQSSNLSQHQRIHMRENLLM

SEQ ID NO: 16001 - protein, 603 aa, Homo Sapiens
MSPGLLTTRKEALMAFRDVAVAFTQKEWKLLSSAQRTLYREVMLENYSHLVSLGIAFSKPKLIEQLEQGDEPWREENEHLLDLCPEPRTEFQPSFPHLVAFSSSQLLRQYALSGHPTQIFPSSSAGGDFQLEAPRCSSEKGESGETEGPDSSLRKRPSRISRTFFSPHQGDPVEWVEGNREGGTDLRLAQRMSLGGSDTMLKGADTSESGAVIRGNYRLGLSKKSSLFSHQKHHVCPECGRGFCQRSDLIKHQRTHTGEKPYLCPECGRRFSQKASLSIHQRKHSGEKPYVCRECGRHFRYTSSLTNHKRIHSGERPFVCQECGRGFRQKIALLLHQRTHLEEKPFVCPECGRGFCQKASLLQHQSSHTGERPFLCLECGRSFRQQSLLLSHQVTHSGEKPYVCAECGHSFRQKVTLIRHQRTHTGEKPYLCPQCGRGFSQKVTLIGHQRTHTGEKPYLCPDCGRGFGQKVTLIRHQRTHTGEKPYLCPKCGRAFGFKSLLTRHQRTHSEEELYVDRVCGQGLGQKSHLISDQRTHSGEKPCICDECGRGFGFKSALIRHQRTHSGEKPYVCRECGRGFSQKSHLHRHRRTKSGHQLLPQEVF

SEQ ID NO: 16002 - protein, 662 aa, Homo Sapiens
MNLTEDYMVFEDVAIHFSQEEWGILNDVQRHLHSDVMLENFALLSSVGCWHGAKDEEAPSKQCVSVGVSQVTTLKPALSTQKAQPCETCSSLLKDILHLAEHDGTHPKRTAKLYLHQKEHLREKLTRSDEGRPSFVNDSVHLAKRNLTCMQGGKDFTGDSDLQQQALHSGWKPHRDTHGVEAFQSGQNNYSCTQCGKDFCHQHTLFEHQKIHTEERPYECSECGKLFRYNSDLIKHQRNHTGERPYKCSECGKAFSLKYNVVQHQKIHTGERPYECSECGKAFLRKSHLLQHQRIHTRPRPYVCSECGKAFLTQAHLVGHQKIHTGERPYGCNECGKYFMYSSALIRHQKVHTGERPFYCCECGKFFMDSCTLIIHQRVHTGEKPYECNECGKFFRYRSTLIRHQKVHTGEKPYECSECGKFFMDTSTLIIHQRVHTGEKPYECNKCGKFFRYCFTLNRHQRVHSGERPYECSECGKFFVDSCTLKSHQRVHTGERPFECSICGKSFRCRSTLDTHQRIHTGERPYECSECGKFFRHNSNHIRHRRNHFGERSFECTECGRVFSQNSHLIRHQKVHTRERTYKCSKCGKFFMDSSTLISHERVHTGEKPYECSECGKVFRYNSSLIKHRRIHTGERPYQCSECGRVFNQNSHLIQHQKVHTR

SEQ ID NO: 16003 - protein, 407 aa, Homo Sapiens
MAAKMEITLSSNTEASSKQERHIIAKLEEKRGPPLQKNCPDPELCRQSFRRFCYQEVSGPQEALSQLRQLCRQWLQPELHTKEQILELLVMEQFLTILPPEIQARVRHRCPMSSKEIVTLVEDFHRASKKPKQWVAVCMQGQKVLLEKTGSQLGEQELPDFQPQTPRRDLRESSPAEPSQAGAYDRLSPHHWEKSPLLQEPTPKLAGTEAPRMRSDNKENPQQEGAKGAKPCAVSAGRSKGNGLQNPEPRGANMSEPRLSRRQVSSPNAQKPFAHYQRHCRVEYISSPLKSHPLRELKKSKGGKRSLSNRLQHLGHQPTRSAKKPYKCDDCGKSFTWNSELKRHKRVHTGERPYTCGECGNCFGRQSTLKLHQRIHTGEKPYQCGQCGKSFRQSSNLHQHHRLHHGD

SEQ ID NO: 16004 - protein, 711 aa, Homo Sapiens
MPADVNLSQKPQVLGPEKQDGSCEASVSFEDVTVDFSREEWQQLDPAQRCLYRDVMLELYSHLFAVGYHIPNPEVIFRMLKEKEPRVEEAEVSHQRCQEREFGLEIPQKEISKKASFQKDMVGEFTRDGSWCSILEELRLDADRTKKDEQNQIQPMSHSAFFNKKTLNTESNCEYKDPGKMIRTRPHLASSQKQPQKCCLFTESLKLNLEVNGQNESNDTEQLDDVVGSGQLFSHSSSDACSKNIHTGETFCKGNQCRKVCGHKQSLKQHQIHTQKKPDGCSECGGSFTQKSHLFAQQRIHSVGNLHECGKCGKAFMPQLKLSVYLTDHTGDIPCICKECGKVFIQRSELLTHQKTHTRKKPYKCHDCGKAFFQMLSLFRHQRTHSREKLYECSECGKGFSQNSTLIIHQKIHTGERQYACSECGKAFTQKSTLSLHQRIHSGQKSYVCIECGQAFIQKAHLIVHQRSHTGEKPYQCHNCGKSFISKSQLDIHHRIHTGEKPYECSDCGKTFTQKSHLNIHQKIHTGERHHVCSECGKAFNQKSILSMHQRIHTGEKPYKCSECGKAFTSKSQFKEHQRIHTGEKPYVCTECGKAFNGRSNFHKHQITHTRERPFVCYKCGKAFVQKSELITHQRTHMGEKPYECLDCGKSFSKKPQLKVHQRIHTGERPYVCSECGKAFNNRSNFNKHQTTHTRDKSYKCSYSVKGFTKQ

SEQ ID NO: 16005 - protein, 549 aa, Homo Sapiens
MPVDLGQALGLLPSLAKAEDSQFSESDAALQEELSSPETARQLFRQFRYQVMSGPHETLKQLRKLCFQWLQPEVHTKEQILEILMLEQFLTILPGEIQMWVRKQCPGSGEEAVTLVESLKGDPQRLWQWISIQVLGQDILSEKMESPSCQVGEVEPHLEVVPQELGLENSSSGPGELLSHIVKEESDTEAELALAASQPARLEERLIRDQDLGASLLPAAPQEQWRQLDSTQKEQYWDLMLETYGKMVSGAGISHPKSDLTNSIEFGEELAGIYLHVNEKIPRPTCIGDRQENDKENLNLENHRDQELLHASCQASGEVPSQASLRGFFTEDEPGCFGEGENLPEALQNIQDEGTGEQLSPQERISEKQLGQHLPNPHSGEMSTMWLEEKRETSQKGQPRAPMAQKLPTCRECGKTFYRNSQLIFHQRTHTGETYFQCTICKKAFLRSSDFVKHQRTHTGEKPCKCDYCGKGFSDFSGLRHHEKIHTGEKPYKCPICEKSFIQRSNFNRHQRVHTGEKPYKCSHCGKSFSWSSSLDKHQRSHLGKKPFQ

SEQ ID NO: 16006 - protein, 692 aa, Homo Sapiens
MRACAGSTREAGSGAQDLSTLLCLEESMEEQDEKPPEPPKACAQDSFLPQEIIIKVEGEDTGSLTIPSQEGVNFKIVTVDFTREEQGTWNPAQRTLDRDVILENHRDLVSWDLATAVGKKDSTSKQRIFDEEPANGVKIERFTRDDPWLSSCEEVDDCKDQLEKQQEKQEILLQEVAFTQRKAVIHERVCKSDETGEKSGLNSSLFSSPVIPIRNHFHKHVSHAKKWHLNAAVNSHQKINENETLYENNECGKPPQSIHLIQFTRTQTKDKCYGFSDRIQSFCHGTPLHIHEKIHGGGKTFDFKECGQVLNPKISHNEQQRIPFEESQYKCSETSHSSSLTQNMRNNSEEKPFECNQCGKSFSWSSHLVAHQRTHTGEKPYECSECGKSFSRSSHLVSHQRTHTGEKPYRCNQCGKSFSQSYVLVVHQRTHTGEKPYECNQCGKSFRQSYKLIAHQRTHTGEKPYECNQCGKSFIQSYKLIAHQRIHTGEKPYECNQCGKSFSQSYKLVAHQRTHTGEKPFECNQCGKSFSWSSQLVAHQRTHTGEKPYECSECGKSFNRSSHLVMHQRIHTGEKPYECNQCGKSFSQSYVLVVHQRTHTGEKPYECSQCGKSFRQSSCLTQHQRTHTGEKPFECNQCGKTFSLSARLIVHQRTHTGEKPFTCIQCGKAFINSYKLIRHQATHTEEKLYECN

SEQ ID NO: 16007 - protein, 571 aa, Homo Sapiens
MPQVTFNDVAIDFTHEEWGWLSSAQRDLYKDVMVQNYENLVSVAGLSVTKPYVITLLEDGKEPWMMEKKLSKGMIPDWESRWENKELSTKKDNYDEDSPQTVIIEKVVKQSYEFSNSKKNLEYIEKLEGKHGSQVDHFRPAILTSRESPTADSVYKYNIFRSTFHSKSTLSEPQKISAEGNSHKYDILKKNLPKKSVIKNEKVNGGKKLLNSNKSGAAFSQGKSLTLPQTCNREKIYTCSECGKAFGKQSILNRHWRIHTGEKPYECRECGKTFSHGSSLTRHLISHSGEKPYKCIECGKAFSHVSSLTNHQSTHTGEKPYECMNCGKSFSRVSHLIEHLRIHTQEKLYECRICGKAFIHRSSLIHHQKIHTGEKPYECRECGKAFCCSSHLTRHQRIHTMEKQYECNKCLKVFSSLSFLVQHQSIHTEEKPFECQKCRKSFNQLESLNMHLRNHIRLKPYECSICGKAFSHRSSLLQHHRIHTGEKPYECIKCGKTFSCSSNLTVHQRIHTGEKPYKCNECGKAFSKGSNLTAHQRVHNGEKPNSVVSVEKPLDYMNHYTCEKSYRRETV

SEQ ID NO: 16008 - protein, 639 aa, Homo Sapiens
MTPASASGEDSGSFYSWQKAKREQGLVTFEDVAVDFTQEEWQYLNPPQRTLYRDVMLETYSNLVFVGQQVTKPNLILKLEVEECPAEGKIPFWNFPEVCQVDEQIERQHQDDQDKCLLMQVGFSDKKTIITKSARDCHEFGNILHLSTNLVASIQRPDKHESFGNNMVDNLDLFSRSSAENKYDNGCAKLFFHTEYEKTNPGMKPYGYKECGKGLRRKKGLSLHQRIKNGEKPFECTACRKTFSKKSHLIVHWRTHTGEKPFGCTECGKAFSQKSQLIIHLRTHTGERPFECPECGKAFREKSTVIIHYRTHTGEKPYECNECGKAFTQKSNLIVHQKTHTGEKTYECTKCGESFIQKLDLIIHHSTHTGKKPHECNECKKTFSDKSTLIIHQRTHTGEKPHKCTECGKSFNEKSTLIVHQRTHTGEKPYECDVCGKTFTQKSNLGVHQRTHSGEKPFECNECEKAFSQKSYLMLHQRGHTGEKPYECNECEKAFSQKSYLIIHQRTHTEEKPYKCNECGKAFREKSKLIIHQRIHTGEKPYECPVCWKAFSQKSQLIIHQRTHTGEKPYACTECGKAFREKSTFTVHQRTHTGEKPYKCTECGKAFTQKSNLIVHQRTHAGKKAHGRGHTRKSKFMAH

SEQ ID NO: 16009 - protein, 751 aa, Homo Sapiens
MEDLSSPDSTLLQGGHNLLSSASFQEAVTFKDVIVDFTQEEWKQLDPGQRDLFRDVTLENYTHLVSIGLQVSKPDVISQLEQGTEPWIMEPSIPVGTCADWETRLENSVSAPEPDISEEELSPEVIVEKHKRDDSWSSNLLESWEYEGSLERQQANQQTLPKEIKVTEKTIPSWEKGPVNNEFGKSVNVSSNLVTQEPSPEETSTKRSIKQNSNPVKKEKSCKCNECGKAFSYCSALIRHQRTHTGEKPYKCNECEKAFSRSENLINHQRIHTGDKPYKCDQCGKGFIEGPSLTQHQRIHTGEKPYKCDECGKAFSQRTHLVQHQRIHTGEKPYTCNECGKAFSQRGHFMEHQKIHTGEKPFKCDECDKTFTRSTHLTQHQKIHTGEKTYKCNECGKAFNGPSTFIRHHMIHTGEKPYECNECGKAFSQHSNLTQHQKTHTGEKPYDCAECGKSFSYWSSLAQHLKIHTGEKPYKCNECGKAFSYCSSLTQHRRIHTREKPFECSECGKAFSYLSNLNQHQKTHTQEKAYECKECGKAFIRSSSLAKHERIHTGEKPYQCHECGKTFSYGSSLIQHRKIHTGERPYKCNECGRAFNQNIHLTQHKRIHTGAKPYECAECGKAFRHCSSLAQHQKTHTEEKPYQCNKCEKTFSQSSHLTQHQRIHTGEKPYKCNECDKAFSRSTHLTEHQNTHTGEKPYNCNECRKTFSQSTYLIQHQRIHSGEKPFGCNDCGKSFRYRSALNKHQRLHPGI

SEQ ID NO: 16010 - protein, 626 aa, Homo Sapiens
MASPSPPPESKGLLTFEDVAVFFTQEEWDYLDPAQRSLYKDVMMENYGNLVSLDVLNRDKDEEPTVKQEIEEIEEEVEPQGVIVTRIKSEIDQDPMGRETFELVGRLDKQRGIFLWEIPRESLTQEQRMFRENTNIIRKRPNSEEKCHKCEECGKGFVRKAHFIQHQRVHTGEKPFQCNECGKSFSRSSFVIEHQRIHTGERPYECNYCGKTFSVSSTLIRHQRIHTGERPYQCNQCKQSFSQRRSLVKHQRIHTGEKPHKCSDCGKAFSWKSHLIEHQRTHTGEKPYHCTKCKKSFSRNSLLVEHQRIHTGERPHKCGECGKAFRLSTYLIQHQKIHTGEKPFLCIECGKSFSRSSFLIEHQRIHTGERPYQCKECGKSFSQLCNLTRHQRIHTGDKPHKCEECGKAFSRSSGLIQHQRIHTREKTYPYNETKESFDPNCSLVIQQEVYPKEKSYKCDECGKTFSVSAHLVQHQRIHTGEKPYLCTVCGKSFSRSSFLIEHQRIHTGERPYLCRQCGKSFSQLCNLIRHQGVHTGNKPHKCDECGKAFSRNSGLIQHQRIHTGEKPYKCEKCDKSFSQQRSLVNHQKIHAEVKTQETHECDACGEAFNCRISLIQHQKLHTAWMQ

SEQ ID NO: 16011 - protein, 458 aa, Homo Sapiens
MAAMPLKAQYQEMVTFEDVAVHFTKTEWTGLSPAQRALYRSVMLENFGNLTALGYPVPKPALISLLERGDMAWGLEAQDDPPAERTKNVCKDVETNIDSESTLIQGISEERDGMMSHGQLKSVPQRTDFPETRNVEKHQDIPTVKNIQGKVPRIPCARKPFICEECGKSFSYFSYYARHQRIHTGEKPFECSECGKAFNGNSSLIRHQRIHTGERPYQCEECGRAFNDNANLIRHQRIHSGDRPYYCTECGNSFTSSSEFVIHQRIHTGEKPYECNECGKAFVGNSPLLRHQKIHTGEKPYECNECGKSFGRTSHLSQHQRIHTGEKPYSCKVCGQAFNFHTKLTRHQRIHSEEKPFDCVDCGKAFSAQEQLKRHLRIHTQESSYVCDECGKALTSKRNLHQHQRIHTGEKPYECSKYEKAFGTSSQLGHLEHVYSGEKPVLDICRFGLPEFFTPFYW

SEQ ID NO: 16012 - protein, 629 aa, Homo Sapiens
MTLLTFRDVAIEFSLEEWKCLDLAQQNLYRDVMLENYRNLFSVGLTVCKPGLITCLEQRKEPWNVKRQEAADGHPEMGFHHATQACLELLGSSDLPASASQSAGITGVNHRAQPGLNVSVDKFTALCSPGVLQTVKWFLEFRCIFSLAMSSHFTQDLLPEQGIQDAFPKRILRGYGNCGLDNLYLRKDWESLDECKLQKDYNGLNQCSSTTHSKIFQYNKYVKIFDNFSNLHRRNISNTGEKPFKCQECGKSFQMLSFLTEHQKIHTGKKFQKCGECGKTFIQCSHFTEPENIDTGEKPYKCQECNNVIKTCSVLTKNRIYAGGEHYRCEEFGKVFNQCSHLTEHEHGTEEKPCKYEECSSVFISCSSLSNQQMILAGEKLSKCETWYKGFNHSPNPSKHQRNEIGGKPFKCEECDSIFKWFSDLTKHKRIHTGEKPYKCDECGKAYTQSSHLSEHRRIHTGEKPYQCEECGKVFRTCSSLSNHKRTHSEEKPYTCEECGNIFKQLSDLTKHKKTHTGEKPYKCDECGKNFTQSSNLIVHKRIHTGEKPYKCEECGRVFMWFSDITKHKKTHTGEKPYKCDECGKNFTQSSNLIVHKRIHTGEKPYKCEKCGKAFTQFSHLTVHESIHT

SEQ ID NO: 16013 - protein, 1029 aa, Homo Sapiens
MTRENVAHNALRQEGLVKGKDDTWKWGTSFQGSSSSVWETSHLHFRQLRYHETSGPQEALSRLRELCRRWLRPEARTKAQILELLVLEQFLSILPGEIRTWVQLHHPGSGEEAVALVEELQKDLDGPAIQVPVLVKDQDTLQKVVSAPGTTLPPVLPGSHIAAEICPHPPTDLVAFNLQDPQHDSPAPEASALSQEENPRNQLMALMLLTAQPQELVMFEEVSVCFTSEEWACLGPIQRALYWDVMLENYGNVTSLEWETMTENEEVTSKPSSSQRADSHKGTSKRLQGSVPQVLDFEEECEWQVLASQWGNETDERADTVKKVSLCERDKKKRTPPEKQGQKWKELGDSLTFGSAISESLIGTEGKKFYKCDMCCKHFNKISHLINHRRIHTGEKPHKCKECGKGFIQRSSLLMHLRNHSGEKPYKCNECGKAFSQSAYLLNHQRIHTGEKPYKCKECGKGFYRHSGLIIHLRRHSGERPYKCNECGKVFSQNAYLIDHQRLHKGEEPYKCNKCQKAFILKKSLILHQRIHSGEKPYKCDECGKTFAQTTYLIDHQRLHSAENPYKCKECGKVFIRSKSLLLHQRVHTEKKTFGCKKCGKIFSSKSNFIDHKRMHSREKPYKCTECGKAFTQSAYLFDHQRLHNGEKPYECNECGKVFILKKSLILHQRFHTGENLYECKDCGKVFGSNRNLIDHERLHNGEKPYECRECGKTFIMSKSFMVHQKLHTQEKAYKCEDCGKAFSYNSSLLVHRRIHTGEKPFECSECGRAFSSNRNLIEHKRIHSGEKPYECDECGKCFILKKSLIGHQRIHTREKSYKCNDCGKVFSYRSNLIAHQRIHTGEKPYACSECGKGFTYNRNLIEHQRIHSGEKTYECHVCRKVLTSSRNLMVHQRIHTGEKPYKCNECGKDFSQNKNLVVHQRMHTGEKPYECDKCRKSFTSKRNLVGHQRIHTGEKPYGCNDCSKVFRQRKNLTVHQKIHTDEKPCECDVSEKEFSQTSNLHLQQKIHTIEEFSWLQNTNESKIEIQKI

SEQ ID NO: 16014 - protein, 426 aa, Homo Sapiens
MAAVSPTTRCQESVTFEDVAVVFTDEEWSRLVPIQRDLYKEVMLENYNSIVSLGLPVPQPDVIFQLKRGDKPWMVDLHGSEEREWPESVSLDWETKPEIHDASDKKSEGSLRECLGRQSPLCPKFEVHTPNGRMGTEKQSPSGETRKKSLSRDKGLRRRRSALSREILTKERHQECSDCGKTFFDHSSLTRHQRTHTGEKPYDCRECGKAFSHRSSLSRHLMSHTGESPYECSVCSKAFFDRSSLTVHQRIHTGEKPFQCNECGKAFFDRSSLTRHQRIHTGESPYECHQCGKAFSQKSILTRHQLIHTGRKPYECNECGKAFYGVSSLNRHQKAHAGDPRYQCNECGKAFFDRSSLTQHQKIHTGDKPYECSECGKAFSQRCRLTRHQRVHTGEKPFECTVCGKVFSSKSSVIQHQRRYAKQGID

SEQ ID NO: 16015 - protein, 532 aa, Homo Sapiens
MMFQDSVAFEDVAVSFTQEEWALLDPSQKNLYRDVMQETFKNLTSVGKTWKVQNIEDEYKNPRRNLSLMREKLCESKESHHCGESFNQIADDMLNRKTLPGITPCESSVCGEVGTGHSSLNTHIRADTGHKSSEYQEYGENPYRNKECKKAFSYLDSFQSHDKACTKEKPYDGKECTETFISHSCIQRHRVMHSGDGPYKCKFCGKAFYFLNLCLIHERIHTGVKPYKCKQCGKAFTRSTTLPVHERTHTGVNADECKECGNAFSFPSEIRRHKRSHTGEKPYECKQCGKVFISFSSIQYHKMTHTGEKPYECKQCGKAFRCGSHLQKHGRTHTGEKPYECRQCGKAFRCTSDLQRHEKTHTEDKPYGCKQCGKGFRCASQLQIHERTHSGEKPHECKECGKVFKYFSSLRIHERTHTGEKPHECKQCGKAFRYFSSLHIHERTHTGDKPYECKVCGKAFTCSSSIRYHERTHTGEKPYECKHCGKAFISNYIRYHERTHTGEKPYQCKQCGKAFIRASSCREHERTHTINR

SEQ ID NO: 16016 - protein, 390 aa, Homo Sapiens; identical to SEQ ID NO: 15978

SEQ ID NO: 16017 - protein, 395 aa, Homo Sapiens
MMAAKVVPMPPKPKQSFILRVPPDSKLGQDLLRDATNGPKTIHQLVLEHFLTFLPKPSLVQPSQKVKETLVIMKDVSSSLQNRVHPRPLVKLLPKGVQKEQETVSLYLKANPEELVVFEDLNVFHCQEECVSLDPTQQLTSEKEDDSSVGEMMLLAVNGSNPEGEDPEREPVENEDYREKSSDDDEMDSSLVSQQPPDNQEKERLNTSIPQKRKMRNLLVTIENDTPLEELSKYVDISIIALTRNRRTRRWYTCPLCGKQFNESSYLISHQRTHTGEKPYDCNHCGKSFNHKTNLNKHERIHTGEKPYSCSQCGKNFRQNSHRSRHEGIHIREKIFKCPECGKTFPKNEEFVLHLQSHEAERPYGCKKCGRRFGRLSNCTRHEKTHSACKTRKQK

SEQ ID NO: 16018 - protein, 648 aa, Homo Sapiens
MATAVEPEDQDLWEEEGILMVKLEDDFTCRPESVLQRDDPVLETSHQNFRRFRYQEAASPREALIRLRELCHQWLRPERRTKEQILELLVLEQFLTVLPGELQSWVRGQRPESGEEAVTLVEGLQKQPRRPRRWVTVHVHGQEVLSEETVHLGVEPESPNELQDPVQSSTPEQSPEETTQSPDLGAPAEQRPHQEEELQTLQESEVPVPEDPDLPAERSSGDSEMVALLTALSQGLVTFKDVAVCFSQDQWSDLDPTQKEFYGEYVLEEDCGIVVSLSFPIPRPDEISQVREEEPWVPDIQEPQETQEPEILSFTYTGDRSKDEEECLEQEDLSLEDIHRPVLGEPEIHQTPDWEIVFEDNPGRLNERRFGTNISQVNSFVNLRETTPVHPLLGRHHDCSVCGKSFTCNSHLVRHLRTHTGEKPYKCMECGKSYTRSSHLARHQKVHKMNAPYKYPLNRKNLEETSPVTQAERTPSVEKPYRCDDCGKHFRWTSDLVRHQRTHTGEKPFFCTICGKSFSQKSVLTTHQRIHLGGKPYLCGECGEDFSEHRRYLAHRKTHAAEELYLCSECGRCFTHSAAFAKHLRGHASVRPCRCNECGKSFSRRDHLVRHQRTHTGEKPFTCPTCGKSFSRGYHLIRHQRTHSEKTS

SEQ ID NO: 16019 - protein, 554 aa, Homo Sapiens
MSADGGGIQDTQDKETPPEVPDRGHPHQEMPSKLGEAVPSGDTQESLHIKMEPEEPHSEGASQEDGAQGAWGWAPLSHGSKEKALFLPGGALPSPRIPVLSREGRTRDRQMAAALLTAWSQMPVTFEDVALYLSREEWGRLDHTQQNFYRDVLQKKNGLSLGFPFSRPFWAPQAHGKGEASGSSRQAGDEKEWRGACTGAVEVGQRVQTSSVAALGNVKPFRTRAGRVQWGVPQCAQEAACGRSSGPAKDSGQPAEPDRTPDAAPPDPSPTEPQEYRVPEKPNEEEKGAPESGEEGLAPDSEVGRKSYRCEQCGKGFSWHSHLVTHRRTHTGEKPYACTDCGKRFGRSSHLIQHQIIHTGEKPYTCPACRKSFSHHSTLIQHQRIHTGEKPYVCDRCAKRFTRRSDLVTHQGTHTGAKPHKCPICAKCFTQSSALVTHQRTHTGVKPYPCPECGKCFSQRSNLIAHNRTHTGEKPYHCLDCGKSFSHSSHLTAHQRTHRGVRPYACPLCGKSFSRRSNLHRHEKIHTTGPKALAMLMLGAAAAGALATPPPAPT

SEQ ID NO: 16020 - protein, 478 aa, Homo Sapiens; identical to SEQ ID NO: 14396

SEQ ID NO: 16021 - protein, 1280 aa, Homo Sapiens
MGSLTFRDVAIEFSLEEWQCLDTAQQNLYRNVMLENYRNLVFLGIAAFKPDLIIFLEEGKESWNMKRHEMVEESPVICSHFAQDLWPEQGIEDSFQKVILRRYEKCGHENLHLKIGYTNVDECKVHKEGYNKLNQSLTTTQSKVFQRGKYANVFHKCSNSNRHKIRHTGKKHLQCKEYVRSFCMLSHLSQHKRIYTRENSYKCEEGGKAFNWSSTLTYYKSAHTGEKPYRCKECGKAFSKFSILTKHKVIHTGEKSYKCEECGKAFNQSAILTKHKIIHTGEKPNKCEECGKAFSKVSTLTTHKAIHAGEKPYKCKECGKAFSKVSTLITHKAIHAGEKPYKCKECGKAFSKFSILTKHKVIHTGEKPYKCEECGKAYKWPSTLSYHKKIHTGEKPYKCEECGKGFSMFSILTKHEVIHTGEKPYKCEECGKAFNWSSNLMEHKKIHTGETPYKCEECGKGFSMFSILTKHKVIHNGEKPYKCEECDKATHAGEKPYKCEECGKAFNWSSNLMEHKRIHTGEKPYKCEECGKSFSTFSILTKHKVIHTGEKPYKCEECGKAYKWSSTLSYHKKIHTVEKPYKCEECGKAFNQSAILIKHKRIHTGEKPYKCEECGKTFSKVSTLTTHKAIHAGEKPYKCKECGKTFIKVSTLTTHKAIHAGEKPYKCKECGKAFSKFSILTKHKVIHTGEKPYKCEECGKAFNWSSNLMEHKRIHTGEKPYKCEECGKSFSTFSVLTKHKVIHTGEKPYKCEECGKAYKWSSTLSYHKKIHTVEKPYKCEECGKAFNRSAILIKHKRIHTDEKPYKCEECGKTFSKVSTLTTHKAIHAGEKPYKCKECGKAFSKFSILTKHKVIHTGEKPYKCEECGKAYKWPSTLSYHKKIHTGEKPYKCEECGKGFSMFSILTKHEVIHTGEKPYKCEECGKAFSWLSVFSKHKKTHAGEKFYKCEACGKAYKSSSTLSYHKKIHTEEKPYKYEECGKGFSTFSILTKHKVIHTGEKPYKCEECGKAFNWSSNLMEHKKIHTGETPYKCEECDKAFSWPSSLTEHKATHAGEKPYKCEECGKAFSWPSRLTEHKATHAGEEPYKCEECGKAFNWSSNLMEHKRIHTGEKPYKCEECGKSFSTFSILTKHKVIHTGEKPYKCEECGKAYKWSSTLSYHKKIHTVEKPYKCEECGKGFVMFSILAKHKVIHTGEKLYKCEECGKAYKWPSTLRYHKKIHTGEKPYKCEECGKAFSTFSILTKHKVIHTGEKPYKCEECGKAFSWLSVFSKHKKIHTGEKL

SEQ ID NO: 16022 - protein, 564 aa, Homo Sapiens
MLGFPPGRPQLPVQLRPQTRMATALRDPASGSVTFEDVAVYFSWEEWDLLDEAQKHLYFDVMLENFALTSSLGCWCGVEHEETPSEQRISGERVPQFRTSKEGSSSQNADSCEICCLVLRDILHLAEHQGTNCGQKLHTCGKQFYISANLQQHQRQHITEAPFRSYVDTASFTQSCIVHVSEKPFTCREIRKDFLANMRFLHQDATQTGEKPNNSNKCAVAFYSGKSHHNWGKCSKAFSHIDTLVQDQRILTREGLFECSKCGKACTRRCNLIQHQKVHSEERPYECNECGKFFTYYSSFIIHQRVHTGERPYACPECGKSFSQIYSLNSHRKVHTGERPYECGECGKSFSQRSNLMQHRRVHTGERPYECSECGKSFSQNFSLIYHQRVHTGERPHECNECGKSFSRSSSLIHHRRLHTGERPYECSKCGKSFKQSSSFSSHRKVHTGERPYVCGECGKSFSHSSNLKNHQRVHTGERPVECSECSKSFSCKSNLIKHLRVHTGERPYECSECGKSFSQSSSLIQHRRVHTGKRPYQCSQCGKSFGCKSVLIQHQRVHIGEKP

SEQ ID NO: 16023 - protein, 495 aa, Homo Sapiens
MAESAPARHRRKRRSTPLTSSTLPSQATEKSSYFQTTEISLWTVVAAIQAVEKKMESQAARLQSLEGRTGTAEKKLADCEKMAVEFGNQLEGKWAVLGTLLQEYGLLQRRLENVENLLRNRNFWILRLPPGSKGEAPKVSRSLENDGVCFTEQEWENLEDWQKELYRNVMESNYETLVSLKVLGQTEGEAELGTEMLGDLEEEGPGGAHPAGGVMIKQELQYTQEGPADLPGEFSCIAEEQAFLSPEQTELWGGQGSSVLLETGPGDSTLEEPVGSRVPSSSRTVGCPKQKSHRQVQLDQECGQGLKLKKDTSRPYECSECEITFRYKQQLATHLRSHSGWGSCTPEEPEESLRPRPRLKPQTKKAKLHQCDVCLRSFSCKVSLVTHQRCHLQEGPSAGQHVQERFSPNSLVALPGHIPWRKSRSSLICGYCGKSFSHPSDLVRHQRIHTGERPYSCTECEKSFVQKQHLLQHQKIHQRERGGLALEPGRPNGLL

SEQ ID NO: 16024 - protein, 459 aa, Homo Sapiens
MAAPLEAQDQAPGEGEGLLIVKVEDSSWEQESAQHEDGRDSEACRQRFRQFCYGDVHGPHEAFSQLWELCCRWLRPELRTKEQILELLVLEQFLTVLPGEIQGWVREQHPGSGEEAVALVEDLQKQPVKAWRQDVPSEEAEPEAAGRGSQATGPPPTVGARRRPSVPQEQHSHSAQPPALLKEGRPGETTDTCFVSGVHGPVALGDIPFYFSREEWGTLDPAQRDLFWDIKRENSRNTTLGFGLKGQSEKSLLQEMVPVVPGQTGSDVTVSWSPEEAEAWESENRPRAALGPVVGARRGRPPTRRRQFRDLAAEKPHSCGQCGKRFRWGSDLARHQRTHTGEKPHKCPECDKSFRSSSDLVRHQGVHTGEKPFSCSECGKSFSRSAYLADHQRIHTGEKPFGCSDCGKSFSLRSYLLDHRRVHTGERPFGCGECDKSFKQRAHLIAHQSLHAKMAQPVG

SEQ ID NO: 16025 - protein, 606 aa, Homo Sapiens
MAVTFEDVTIIFTWEEWKFLDSSQKRLYREVMWENYTNVMSVENWNESYKSQEEKFRYLEYENFSYWQGWWNAGAQMYENQNYGETVQGTDSKDLTQQDRSQCQEWLILSTQVPGYGNYELTFESKSLRNLKYKNFMPWQSLETKTTQDYGREIYMSGSHGFQGGRYRLGISRKNLSMEKEQKLIVQHSYIPVEEALPQYVGVICQEDLLRDSMEEKYCGCNKCKGIYYWNSRCVFHKRNQPGENLCQCSICKACFSQRSDLYRHPRNHIGKKLYGCDEVDGNFHQSSGVHFHQRVHIGEVPYSCNACGKSFSQISSLHNHQRVHTEEKFYKIECDKDLSRNSLLHIHQRLHIGEKPFKCNQCGKSFNRSSVLHVHQRVHTGEKPYKCDECGKGFSQSSNLRIHQLVHTGEKSYKCEDCGKGFTQRSNLQIHQRVHTGEKPYKCDDCGKDFSHSSDLRIHQRVHTGEKPYTCPECGKGFSKSSKLHTHQRVHTGEKPYKCEECGKGFSQRSHLLIHQRVHTGEKPYKCHDCGKGFSHSSNLHIHQRVHTGEKPYQCAKCGKGFSHSSALRIHQRVHAGEKPYKCREYYKGFDHNSHLHNNHRRGNL

SEQ ID NO: 16026 - protein, 517 aa, Homo Sapiens
MQPLSKLMAISKPRNLSLREQREVLRADMSWQQETNPVVETHDSEASRQKFRHFQYLKVSGPHEALSQLWELCLQWLRPEIHTKKQIIELLVLEQFLAILPEEVRTWVNLQHPNNSKDMVTLIEDVIEMLEDEDMPCKDSALQMGSIKEKMKAGSRTGKPQEPVTFKDVVVEFSKEEWGQLDSAVKNLYRNVMLENFRNLNSLRKAHLLSKPFESLKLESKKKRWIMEKEIPRKTIFDMKSISGEESSHGVIMTRLTESGHPSSDAWKGENWLYRNQKKWDINLPQEAFIPETIYTEEEDFECSENKKSFDINSVSSICAIQVGIPSRKGSPKCDKFKTYFKFNLDSVGKQHSEYEYGNDLSLSTDIRHQKSHTTMNSYECYQCGKAFCRSSSLIRHQIIHTGEKPYKCSECGRFFNRRTNLTKHQKLHAEAKACTSNKCGKAFSKSEDSNNPTLHFGNNFYQCVNCGKSFNRSSSLIRHQMIHTGEKPFKCKECSKAFNRSSNLVKHQKLHTRDKS

SEQ ID NO: 16027 - protein, 1048 aa, Homo Sapiens
MQSKVTGNMPTQSLLMYMDGPEVIGSSLGSPMEMEDALSMKGTAVVPFRATQEKNVIQIEGYMPLDCMFCSQTFTHSEDLNKHVLMQHRPTLCEPAVLRVEAEYLSPLDKSQVRTEPPKEKNCKENEFSCEVCGQTFRVAFDVEIHMRTHKDSFTYGCNMCGRRFKEPWFLKNHMRTHNGKSGARSKLQQGLESSPATINEVVQVHAAESISSPYKICMVCGFLFPNKESLIEHRKVHTKKTAFGTSSAQTDSPQGGMPSSREDFLQLFNLRPKSHPETGKKPVRCIPQLDPFTTFQAWQLATKGKVAICQEVKESGQEGSTDNDDSSSEKELGETNKGSCAGLSQEKEKCKHSHGEAPSVDADPKLPSSKEKPTHCSECGKAFRTYHQLVLHSRVHKKDRRAGAESPTMSVDGRQPGTCSPDLAAPLDENGAVDRGEGGSEDGSEDGLPEGIHLDKNDDGGKIKHLTSSRECSYCGKFFRSNYYLNIHLRTHTGEKPYKCEFCEYAAAQKTSLRYHLERHHKEKQTDVAAEVKNDGKNQDTEDALLTADSAQTKNLKRFFDGAKDVTGSPPAKQLKEMPSVFQNVLGSAVLSPAHKDTQDFHKNAADDSADKVNKNPTPAYLDLLKKRSAVETQANNLICRTKADVTPPPDGSTTHNLEVSPKEKQTETAADCRYRPSVDCHEKPLNLSVGALHNCPAISLSKSLIPSITCPFCTFKTFYPEVLMMHQRLEHKYNPDVHKNCRNKSLLRSRRTGCPPALLGKDVPPLSSFCKPKPKSAFPAQSKSLPSAKGKQSPPGPGKAPLTSGIDSSTLAPSNLKSHRPQQNVGVQGAATRQQQSEMFPKTSVSPAPDKTKRPETKLKPLPVAPSQPTLGSSNINGSIDYPAKNDSPWAPPGRDYFCNRSASNTAAEFGEPLPKRLKSSVVALDVDQPGANYRRGYDLPKYHMVRGITSLLPQDCVYPSQALPPKPRFLSSSEVDSPNVLTVQKPYGGSGPLYTCVPAGSPASSSTLEGKRPVSYQHLSNSMAQKRNYENFIGNAHYRPNDKKT

SEQ ID NO: 16028 - protein, 722 aa, Homo Sapiens
MEGSRPRAPSGHLAPSPPAFDGELDLQRYSNGPAVSAGSLGMGAVSWSESRAGERRFPCPVCGKRFRFNSILALHLRAHPGAQAFQCPHCGHRAAQRALLRSHLRTHQPERPRSPAARLLLELEERALLREARLGRARSSGGMQATPATEGLARPQAPSSSAFRCPYCKGKFRTSAERERHLHILHRPWKCGLCSFGSSQEEELLHHSLTAHGAPERPLAATSAAPPPQPQPQPPPQPEPRSVPQPEPEPEPEREATPTPAPAAPEEPPAPPEFRCQVCGQSFTQSWFLKGHMRKHKASFDHACPVCGRCFKEPWFLKNHMKVHASKLGPLRAPGPASGPARAPQPPDLGLLAYEPLGPALLLAPAPTPAERREPPSLLGYLSLRAGEGRPNGEGAEPGPGRSFGGFRPLSSALPARARRHRAEEPEEEEEVVEAEEETWARGRSLGSLASLHPRPGEGPGHSASAAGAQARSTATQEENGLLVGGTRPEGGRGATGKDCPFCGKSFRSAHHLKVHLRVHTGERPYKCPHCDYAGTQSGSLKYHLQRHHREQRSGAGPGPPPEPPPPSQRGSAPQSGAKPSPQPATWVEGASSPRPPSSGAGPGSRRKPASPGRTLRNGRGGEAEPLDLSLRAGPGGEAGPGGALHRCLFCPFATGAPELMALHLQVHHSRRARGRRPPQADASPPYARVPSGETPPSPSQEGEEGSGLSRPGEAGLGGQER

SEQ ID NO: 16029 - protein, 224 aa, Homo Sapiens
MRLAKPKAGISRSSSQGKAYENKRKTGRQRQKWGMTIRFDSSFSRLRRSLDDKPYKCTECEKSFSQSSTLFQHQKIHTGKKSHKCADCGKSFFQSSNLIQHRRIHTGEKPYKCDECGESFKQSSNLIQHQRIHTGEKPYQCDECGRCFSQSSHLIQHQRTHTGEKPYQCSECGKCFSQSSHLRQHMKVHKEEKPRKTRGKNIRVKTHLPSWKAGTGRKSVAGLR

SEQ ID NO: 16030 - protein, 617 aa, Homo Sapiens
MISPSLELLHSGLCKFPEVEGKMTTFKEAVTFKDVAVVFTEEELGLLDPAQRKLYRDVMLENFRNLLSVGNQPFHQDTFHFLGKEKFWKMKTTSQREGNSGGKIQIEMETVPEAGPHEEWSCQQIWEQIASDLTRSQNSIRNSSQFFKEGDVPCQIEARLSISHVQQKPYRCNECKQSFSDVSVFDLHQQSHSGEKSHTCGECGKSFCYSPALHIHQRVHMGEKCYKCDVCGKEFNQSSHLQTHQRVHTGEKPFKCGQCGKGFHSRSALNVHCKLHTGEKPYNCEECGKAFIHDSQLQEHQRIHTGEKPFKCDICGKSFRVRSRLNRHSMVHTGEKPFRCDTCGKNFRQRSALNSHSMVHIEEKPYKCEQCGKGFICRRDFCKHQMVHTGEKPYNCKECGKTFRWSSCLLNHQQVHSGQKSFKCEECGKGFYTNSRRSSHQRSHNGEKPYNCEECGKDYKRRLDLEFHQRVHTGERPYNCKECGKSFGWASCLLKHQRLHSGEKPFKCEECGKRFTQSSQLHSHQTCHTGEKLYKCEQCEKGYNSKFNLDMHQRVHGGERPYNCKECGKSFGWASCLLKHQRLHSGEKPLKSGVWEEIYSEFTASFTSVSLCGRKAI

SEQ ID NO: 16031 - protein, 482 aa, Homo Sapiens
MTMSKEAVTFKDVAVVFTEEELGLLDLAQRKLYRDVMLENFRNLLSVGHQPFHRDTFHFLREEKFWMMDIATQREGNSGGKIQPEMKTFPEAGPHEGWSCQQIWEEIASDLTRPQDSTIKSSQFFEQGDAHSQVEEGLSIMHTGQKPSNCGKCKQSFSDMSIFDLPQQIRSAEKSHSCDECGKSFCYISALHIHQRVHLGEKLFKCDVCGKEFSQSLHLQTHQRVHTGEKPFKCEQCGRGFRCRSALTVHCKLHMGEKHYNCEACGRAFIHDFQLQKHQRIHTGEKPFKCEICSVSFRLRSSLNRHCVVHTGKKPNSTGEYGKGFIRRLDLCKHQTIHTGEKPYNCKECGKSFRRSSYLLIHQRVHTGEKPYKCDKCGKSYITKSGLDLHHRAHTGERPYNCDDCGKSFRQASSILNHKRLHCRKKPFKCEDCGKKLVYRSYRKDQQKNHSGENPSKCEDCGKRYKRRLNLDIILSLFLNDT

SEQ ID NO: 16032 - protein, 707 aa, Homo Sapiens
MTTFKEAMTFKDVAVVFTEEELGLLDLAQRKLYRDVMLENFRNLLSVGHQAFHRDTFHFLREEKIWMMKTAIQREGNSGDKIQTEMETVSEAGTHQEWSFQQIWEKIASDLTRSQDLMINSSQFSKEGDFPCQTEAGLSVIHTRQKSSQGNGYKPSFSDVSHFDFHQQLHSGEKSHTCDECGKNFCYISALRIHQRVHMGEKCYKCDVCGKEFSQSSHLQTHQRVHTGEKPFKCVECGKGFSRRSALNVHHKLHTGEKPYNCEECGKAFIHDSQLQEHQRIHTGEKPFKCDICGKSFCGRSRLNRHSMVHTAEKPFRCDTCDKSFRQRSALNSHRMIHTGEKPYKCEECGKGFICRRDLYTHHMVHTGEKPYNCKECGKSFRWASCLLKHQRVHSGEKPFKCEECGKGFYTNSQCYSHQRSHSGEKPYKCVECGKGYKRRLDLDFHQRVHTGEKLYNCKECGKSFSRAPCLLKHERLHSGEKPFQCEECGKRFTQNSHLHSHQRVHTGEKPYKCEKCGKGYNSKFNLDMHQKVHTGERPYNCKECGKSFGWASCLLKHQRLHSGEKPFKCEECGKRFTQNSQLHSHQRVHTGEKPYKCDECGKGFSWSSTRLTHQRRHSRETPLKCEQHGKNIVQNSFSKVQEKVHSVEKPYKCEDCGKGYNRRLNLDMHQRVHMGEKTWKCRECDMCFSQASSLRLHQNVHVGEKP

SEQ ID NO: 16033 - protein, 543 aa, Homo Sapiens
MAAAKAEMQLMSPLQISDPFGSFPHSPTMDNYPKLEEMMLLSNGAPQFLGAAGAPEGSGSNSSSSSSGGGGGGGGGSNSSSSSSTFNPQADTGEQPYEHLTAESFPDISLNNEKVLVETSYPSQTTRLPPITYTGRFSLEPAPNSGNTLWPEPLFSLVSGLVSMTNPPASSSSAPSPAASSASASQSPPLSCAVPSNDSSPIYSAAPTFPTPNTDIFPEPQSQAFPGSAGTALQYPPPAYPAAKGGFQVPMIPDYLFPQQQGDLGLGTPDQKPFQGLESRTQQPSLTPLSTIKAFATQSGSQDLKALNTSYQSQLIKPSRMRKYPNRPSKTPPHERPYACPVESCDRRFSRSDELTRHIRIHTGQKPFQCRICMRNFSRSDHLTTHIRTHTGEKPFACDICGRKFARSDERKRHTKIHLRQKDKKADKSVVASSATSSLSSYPSPVATSYPSPVTTSYPSPATTSYPSPVPTSFSSPGSSTYPSPVHSGFPSPSVATTYSSVPPAFPAQVSSFPSSAVTNSFSASTGLSDMTATFSPRTIEIC

SEQ ID NO: 16034 - protein, 706 aa, Homo Sapiens; identical to SEQ ID NO: 14917

SEQ ID NO: 16035 - protein, 803 aa, Homo Sapiens
MNMFKEAVTFKDVAVAFTEEELGLLGPAQRKLYRDVMVENFRNLLSVGHPPFKQDVSPIERNEQLWIMTTATRRQGNLGEKNQSKLITVQDRESEEELSCWQIWQQIANDLTRCQDSMINNSQCHKQGDFPYQVGTELSIQISEDENYIVNKADGPNNTGNPEFPILRTQDSWRKTFLTESQRLNRDQQISIKNKLCQCKKGVDPIGWISHHDGHRVHKSEKSYRPNDYEKDNMKILTFDHNSMIHTGQKSYQCNECKKPFSDLSSFDLHQQLQSGEKSLTCVERGKGFCYSPVLPVHQKVHVGEKLKCDECGKEFSQGAHLQTHQKVHVIEKPYKCKQCGKGFSRRSALNVHCKVHTAEKPYNCEECGRAFSQASHLQDHQRLHTGEKPFKCDACGKSFSRNSHLQSHQRVHTGEKPYKCEECGKGFICSSNLYIHQRVHTGEKPYKCEECGKGFSRPSSLQAHQGVHTGEKSYICTVCGKGFTLSSNLQAHQRVHTGEKPYKCNECGKSFRRNSHYQVHLVVHTGEKPYKCEICGKGFSQSSYLQIHQKAHSIEKPFKCEECGQGFNQSSRLQIHQLIHTGEKPYKCEECGKGFSRRADLKIHCRIHTGEKPYNCEECGKVFRQASNLLAHQRVHSGEKPFKCEECGKSFGRSAHLQAHQKVHTGDKPYKCDECGKGFKWSLNLDMHQRVHTGEKPYKCGECGKYFSQASSLQLHQSVHTGEKPYKCDVCGKVFSRSSQLQSHQRVHTGEKPYKCEICGKSFSWRSNLTVHHRIHVGDKSYKSNRGGKNIRESTQEKKSIK

SEQ ID NO: 16036 - protein, 799 aa, Homo Sapiens
MPSQNYDLPQKKQEKMTKFQEAVTFKDVAVVFSREELRLLDLTQRKLYRDVMVENFKNLVAVGHLPFQPDMVSQLEAEEKLWMMETETQRSSKHQNKMETLQKFALKYLSNQELSCWQIWKQVASELTRCLQGKSSQLLQGDSIQVSENENNIMNPKGDSSIYIENQEFPFWRTQHSCGNTYLSESQIQSRGKQIDVKNNLQIHEDFMKKSPFHEHIKTDTEPKPCKGNEYGKIISDGSNQKLPLGEKPHPCGECGRGFSYSPRLPLHPNVHTGEKCFSQSSHLRTHQRIHPGEKLNRCHESGDCFNKSSFHSYQSNHTGEKSYRCDSCGKGFSSSTGLIIHYRTHTGEKPYKCEECGKCFSQSSNFQCHQRVHTEEKPYKCEECGKGFGWSVNLRVHQRVHRGEKPYKCEECGKGFTQAAHFHIHQRVHTGEKPYKCDVCGKGFSHNSPLICHRRVHTGEKPYKCEACGKGFTRNTDLHIHFRVHTGEKPYKCKECGKGFSQASNLQVHQNVHTGEKRFKCETCGKGFSQSSKLQTHQRVHTGEKPYRCDVCGKDFSYSSNLKLHQVIHTGEKPYKCEECGKGFSWRSNLHAHQRVHSGEKPYKCEQCDKSFSQAIDFRVHQRVHTGEKPYKCGVCGKGFSQSSGLQSHQRVHTGEKPYKCDVCGKGFRYSSQFIYHQRGHTGEKPYKCEECGKGFGRSLNLRHHQRVHTGEKPHICEECGKAFSLPSNLRVHLGVHTREKLFKCEECGKGFSQSARLEAHQRVHTGEKPYKCDICDKDFRHRSRLTYHQKVHTGKKL

SEQ ID NO: 16037 - protein, 825 aa, Homo Sapiens
METLTSRHEKRALHSQASAISQDREEKIMSQEPLSFKDVAVVFTEEELELLDSTQRQLYQDVMQENFRNLLSVGERNPLGDKNGKDTEYIQDEELRFFSHKELSSCKIWEEVAGELPGSQDCRVNLQGKDFQFSEDAAPHQGWEGASTPCFPIENSLDSLQGDGLIGLENQQFPAWRAIRPIPIQGSWAKAFVNQLGDVQERCKNLDTEDTVYKCNWDDDSFCWISCHVDHRFPEIDKPCGCNKCRKDCIKNSVLHRINPGENGLKSNEYRNGFRDDADLPPHPRVPLKEKLCQYDEFSEGLRHSAHLNRHQRVPTGEKSVKSLERGRGVRQNTHIRNHPRAPVGDMPYRCDVCGKGFRYKSVLLIHQGVHTGRRPYKCEECGKAFGRSSNLLVHQRVHTGEKPYKCSECGKGFSYSSVLQVHQRLHTGEKPYTCSECGKGFCAKSALHKHQHIHPGEKPYSCGECGKGFSCSSHLSSHQKTHTGERPYQCDKCGKGFSHNSYLQAHQRVHMGQHLYKCNVCGKSFSYSSGLLMHQRLHTGEKPYKCECGKSFGRSSDLHIHQRVHTGEKPYKCSECGKGFRRNSDLHSHQRVHTGERPYVCDVCGKGFIYSSDLLIHQRVHTGEKPYKCAECGKGFSYSSGLLIHQRVHTGEKPYRCQECGKGFRCTSSLHKHQRVHTGKKPYTCDQCGKGFSYGSNLRTHQRLHTGEKPYTCCECGKGFRYGSGLLSHKRVHTGEKPYRCHVCGKGYSQSSHLQGHQRVHTGEKPYKCEECGKGFGRNSCLHVHQRVHTGEKPYTCGVCGKGFSYTSGLRNHQRVHLGENPYK

SEQ ID NO: 16038 - protein, 643 aa, Homo Sapiens
MLENYGNVASLGFPLLKPAVISQLEGGSELGGSSPLAAGTGLQGLQTDIQTDNDLTKEMYEGKENVSFELQRDFSQETDFSEASLLEKQQEVHSAGNIKKEKSNTIDGTVKDETSPVEECFFSQSSNSYQCHTITGEQPSGCTGLGKSISFDTKLVKHEIINSEERPFKCEELVEPFRCDSQLIQHQENNTEEKPYQCSECGKAFSINEKLIWHQRLHSGEKPFKCVECGKSFSYSSHYITHQTIHSGEKPYQCKMCGKAFSVNGSLSRHQRIHTGEKPYQCKECGNGFSCSSAYITHQRVHTGEKPYECNDCGKAFNVNAKLIQHQRIHTGEKPYECNECGKGFRCSSQLRQHQSIHTGEKPYQCKECGKGFNNNTKLIQHQRIHTGEKPYECTECGKAFSVKGKLIQHQRIHTGEKPYECNECGKAFRCNSQFRQHLRIHTGEKPYECNECGKAFSVNGKLMRHQRIHTGEKPFECNECGRCFTSKRNLLDHHRIHTGEKPYQCKECGKAFSINAKLTRHQRIHTGEKPFKCMECEKAFSCSSNYIVHQRIHTGEKPFQCKECGKAFHVNAHLIRHQRSHTGEKPFRCVECGKGFSFSSDYIIHQTVHTWKKPYMCSVCGKAFRFSFQLSQHQSVHSEGKS

SEQ ID NO: 16039 - protein, 230 aa, Homo Sapiens
MGQQISDQTQLVINKLPEKVAKHVTLVRESGSLTYEEFLGRVAELNDVTAKVASGQEKHLLFEVQPGSDSSAFWKVVVRVVCTKINKSSGIVEASRIMNLYQFIQLYKDITSQAAGVLAQSSTSEEPDENSSSVTSCQASLWMGRVKQLTDEEECCICMDGRADLILPCAHSFCQKCIDKWSDRHRNCPICRLQMTGANESWVVSDAPTEDDMANYILNMADEAGQPHRP

SEQ ID NO: 16040 - protein, 474 aa, Homo Sapiens
MTTFKEAVTFKDVAVFFTEEELGLLDPAQRKLYQDVMLENFTNLLSVGHQPFHPFHFLREEKFWMMETATQREGNSGGKTIAEAGPHEDCPCQQIWEQTASDLTQSQDSIINNSHFFEQGDVPSQVEAGLSIIHTGQKPSQNGKCKQSFSDVAIFDPPQQFHSGEKSHTCNECGKSFCYISALRIHQRVHLREKLSKCDMRGKEFSQSSCLQTRERVHTGEKPFKCEQCGKGFRCRAILQVHCKLHTGEKPYICEKCGRAFIHDFQLQKHQIIHTGEKPFKCEICGKSFCLRSSLNRHCMVHTAEKLYKSEECGKGFTDSLDLHKHQIIHTGQKPYNCKECGKSFRWSSYLLIHQRIHSGEKPYRCEECGKGYISKSGLNLHQRVHTGERPYNCKECGKSFSRASSILNHKKLHCRKKPFKCEDCGKRLVHRSFCKDQQGDHNGENSSKCEDCGKRYKRRLNLDIILSLFLNDM

SEQ ID NO: 16041 - protein, 417 aa, Homo Sapiens
MAVSLTAAETLALQGTQGQEKMMMMGPKEEEQSCEYETRLPGNHSTSQEIFRQRFRHLRYQETPGPREALSQLRVLCCEWLRPEKHTKEQILEFLVLEQFLTILPEELQSWVRGHHPKSGEEAVTVLEDLEKGLEPEPQVPGPAHGPAQEEPWEKKESLGAAQEALSIQLQPKETQPFPKSEQVYLHFLSVVTEDGPEPKDKGSLPQPPITEVESQVFSEKLATDTSTFEATSEGTLELQQRNPKAERLRWSPAQEESFRQMVVIHKEIPTGKKDHECSECGKTFIYNSHLVVHQRVHSGEKPYKCSDCGKTFKQSSNLGQHQRIHTGEKPFECNECGKAFRWGAHLVQHQRIHSGEKPYECNECGKAFSQSSYLSQHRRIHSGEKPFICKECGKAYGWCSELIRHRRVHARKEPSH

SEQ ID NO: 16042 - protein, 670 aa, Homo Sapiens
MTKFQEMVTFKDVAVVFTREELGLLDLAQRKLYQDVMLENFRNLLSVGYQPFKLDVILQLGKEDKLRMMETEIQGDGCSGHKNQNEIDTLQEVRLRFLSYEDLICWQIWEQFTSKLTSNQDLIINLQGKRSKLLKQGDSPCQVWTGESSQVSEDENYVIKLQGESSNSIKNQELPLRTTWDFWRKMYLREPQNYQSRCQQIDVKNKLCKCDHCVRQRIAHQHDDHGVHKREKAFSHNNCGKDCVKESSQHSIIQSGEQTSDENGKGLSVGSNLELHQQLHLRDKPHVNVEYGKGIGYSSGLPRHQCFHIGEKCYRNGDSGEGFSQGSHLQPHQRVSTGENLYRCQVYARSSNQNSCLPSHELTHPGEKLCTCGRCGKGFHHSLDFDIHCVDSAGERACKCDVYDKGFSQTSQLQAHQRGHSRDKTYKWEVSDRIFNRNSGLHQRVHTGEKPYKCEVCDKGFSKASNLQAHQRIHTGEKPYKCDVCDKNFSRNSHLQAHQRVHTGEKPYKCDTCGKDFSQISHLQAHQRVHKGEKPYKCETCGKGFSQSSHLQDHQQVHTGENPYKCDVCGKGFSWSSHLQAHQRVHTGEKPYKCEECRKGFIWNSYLHVHQRIHTGEKPYKCGMCGKSFSQTSHLQAHQRVHTGEKPYKCFVCGKGFSKSSLSSDSSESP

SEQ ID NO: 16043 - protein, 707 aa, Homo Sapiens; identical to SEQ ID NO: 16032

SEQ ID NO: 16044 - protein, 700 aa, Homo Sapiens
MTTFKEGLTFKDVAVVFTEEELGLLDPVQRNLYQDVMLENFRNLLSVGHHPFKHDVFLLEKEKKLDIMKTATQRKGKSADKIQSEVETVPEAGRHEELYWGQIWKQIASDLIKYEDSMISISRFPRQGDLSCQVRAGLYTTHTGQKFYQCDEYKKSFTDVFNFDLHQQLHSGEKSHTCDECGKSFCYISALHIHQRVHMGEKCYKCDVCGKEFSQSSHLQTHQRVHTVEKPFKCVECGKGFSRRSTLTVHCKLHSGEKPYNCEECGRAFIHASHLQEHQRIHTGEKPFKCDTCGKNFRRRSALNNHCMVHTGEKPYKCEDCGKCFTCSSNLRIHQRVHTGEKPYKCEECGKCFIQPSQFQAHRRIHTGEKPYVCKVCGKGFIYSSSFQAHQGVHTGEKPYKCNECGKSFRMKIHYQVHLVVHTGEKPYKCEVCGKAFRQSSYLKIHLKAHSVQKPFKCEECGQGFNQSSRLQIHQLIHTGEKPYKCEECGKGFSRRADLKIHCRIHTGEKPYNCEECGKVFSQASHLLTHQRVHSGEKPFKCEECGKSFSRSAHLQAHQKVHTGEKPYKCGECGKGFKWSLNLDMHQRVHTGEKPYTCGECGKHFSQASSLQLHQSVHTGEKPYKCDVCGKVFSRSSQLQYHRRVHTGEKPYKCEICGKRFSWRSNLVSHHKIHAAGTFYENDENSKNIRELSEGGSSTR

SEQ ID NO: 16045 - protein, 738 aa, Homo Sapiens
MTKFQEAVTFKDVAVAFTEEELGLLDSAQRKLYRDVMLENFRNLVSVGHQSFKPDMISQLEREEKLWMKELQTQRGKHSGDRNQNEMATLHKAGLRCFSLGELSCWQIKRHIASKLARSQDSMINIEGKSSQFPKHHDSPCQVGAGESIQASVDDNCLVNHIGDHSSIIENQEFPTGKVPNSWSKIYLNETQNYQRSCKQTQMKNKLCIFAPYVDIFSCISHHHDDNIVHKRDKVHSNSDCGKDTLKVSPLTQRSIHTGQKTYQGNECEEAFNDSSSLELHKQVHLGKKSPACSTHEKDTSYSSGIPVQQSVRTGKKRYWCHECGKGFSQSSNLQTHQRVHTGEKPYTCHECGKSFNQSSHLYAHLPIHTGEKPYRCDSCGKGFSRSTDLNIHCRVHTGEKPYKCEVCGKGFTQRSHLQAHERIHTGEKPYKCGDCGKRFSCSSNLHTHQRVHTEEKPYKCDECGKCFSLSFNLHSHQRVHTGEKPYKCEECGKGFSSASSFQSHQRVHTGEKPFRCNVCGKGFSQSSYFQAHQRVHTGEKPYKCEVCGKRFNWSLNLHNHQRVHTGEKPYKCEECGKGFSQASNLQAHQSVHTGEKPFKCDACQKRFSQASHLQAHQRVHTGEKPYKCDTCGKAFSQRSNLQVHQIIHTGEKPFKCEECGKEFSWSAGLSAHQRVHTGEKPYTCQQCGKGFSQASHFHTHQRVHTGERPYICDVCCKGFSQRSHLIYHQRVHTGGNL

SEQ ID NO: 16046 - protein, 1845 aa, Homo Sapiens
MGLCGLLERCWLHHDPDGVLTLNAENTNYAYQVPNFHKCEICLLSFPKESQFQRHMRDHERNDKPHRCDQCPQTFNVEFNLTLHKCTHSGEDPTCPVCNKKFSRVASLKAHIMLHEKEENLICSECGDEFTLQSQLAVHMEEHRQELAGTRQHACKACKKEFETSSELKEHMKTHYKIRVSSTRSYNRNIDRSGFTYSCPHCGKTFQKPSQLTRHIRIHTGERPFKCSECGKAFNQKGALQTHMIKHTGEKPHACAFCPAAFSQKGNLQSHVQRVHSEVKNGPTYNCTECSCVFKSLGSLNTHISKMHMGGPQNSTSSTETAHVLTATLFQTLPLQQTEAQATSASSQPSSQAVSDVIQQLLELSEPAPVESGQSPQPGQQLSITVGINQDILQQALENSGLSSIPAAAHPNDSCHAKTSAPHAQNPDVSSVSNEQTDPTDAEQEKEQESPEKLDKKEKKMIKKKSPFLPGSIREENGVRWHVCPYCAKEFRKPSDLVRHIRIHTHEKPFKCPQCFRAFAVKSTLTAHIKTHTGIKAFKCQYCMKSFSTSGSLKVHIRLHTGVRPFACPHCDKKFRTSGHRKTHIASHFKHTELRKMRHQRKPAKVRVGKTNIPVPDIPLQEPILITDLGLIQPIPKNQFFQSYFNNNFVNEADRPYKCFYCHRAYKKSCHLKQHIRSHTGEKPFKCSQCGRGFVSAGVLKAHIRTHTGLKSFKCLICNGAFTTGGSLRRHMGIHNDLRPYMCPYCQKTFKTSLNCKKHMKTHRYELAQQLQQHQQAASIDDSTVDQQSMQASTQMQVEIESDELPQTAEVVAANPEAMLDLEPQHVVGTEEAGLGQQLADQPLEADEDGFVAPQDPLRGHVDQFEEQSPAQQSFEPAGLPQGFTVTDTYHQQPQFPPVQQLQDSSTLESQALSTSFHQQSLLQAPSSDGMNVTTRLIQESSQEELDLQAQGSQFLEDNEDQSRRSYRCDYCNKGFKKSSHLKQHVRSHTGEKPYKCKLCGRGFVSSGVLKSHEKTHTGVKAFSCSVCNASFTTNGSLTRHMATHMSMKPYKCPFCEEGFRTTVHCKKHMKRHQTVPSAVSATGETEGGDICMEEEEEHSDRNASRKSRPEVITFTEEETAQLAKIRPQESATVSEKVLVQSAAEKDRISELRDKQAELQDEPKHANCCTYCPKSFKKPSDLVRHVRIHTGEKPYKCDECGKSFTVKSTLDCHVKTHTGQKLFSCHVCSNAFSTKGSLKVHMRLHTGAKPFKCPHCELRFRTSGRRKTHMQFHYKPDPKKARKPMTRSSSEGLQPVNLLNSSSTDPNVFIMNNSVLTGQFDQNLLQPGLVGQAILPASVSAGGDLTVSLTDGSLATLEGIQLQLAANLVGPNVQISGIDAASINNITLQIDPSILQQTLQQGNLLAQQLTGEPGLAPQNSSLQTSDSTVPASVVIQPISGLSLQPTVTSANLTIGPLSEQDSVLTTNSSGTQDLTQVMTSQGLVSPSGGPHEITLTINNSSLSQVLAQAAGPTATSSSGSPQEITLTISELNTTSGSLPSTTPMSPSAISTQNLVMSSSGVGGDASVTLTLADTQGMLSGGLDTVTLNITSQGQQFPALLTDPSLSGQGGAGSPQVILVSHTPQSASAACEEIAYQVAGVSGNLAPGNQPEKEGRAHQCLECDRAFSSAAVLMHHSKEVHGRERIHGCPVCRKAFKRATHLKEHMQTHQAGPSLSSQKPRVFKCDTCEKAFAKPSQLERHSRIHTGERPFHCTLCEKAFNQKSALQVHMKKHTGERPYKCAYCVMGFTQKSNMKLHMKRAHSYAGALQESAGHPEQDGEELSRTLHLEEVVQEAAGEWQALTHVF

SEQ ID NO: 16047 - protein, 458 aa, Homo Sapiens
MASTITGSQDCIVNHRGEVDGEPELDISPCQQWGEASSPISRNRDSVMTLQSGCFENIESETYLPLKVSSQIDTQDSSVKFCKNEPQDHQESRRLFVMEESTERKVIKGESCSENLQVKLVSDGQELASPLLNGEATCQNGQLKESLDPIDCNCKDIHGWKSQVVSCSQQRAHTEEKPCDHNNCGKILNTSPDGHPYEKIHTAEKQYECSQCGKNFSQSSELLLHQRDHTEEKPYKCEQCGKGFTRSSSLLIHQAVHTDEKPYKCDKCGKGFTRSSSLLIHHAVHTGEKPYKCDKCGKGFSQSSKLHIHQRVHTGEKPYECEECGMSFSQRSNLHIHQRVHTGERPYKCGECGKGFSQSSNLHIHRCIHTGEKPYQCYECGKGFSQSSDLRIHLRVHTGEKPYHCGKCGKGFSQSSKLLIHQRVHTGEKPYECSKCGKGFSQSSNLHIHQRVHKKDPR

SEQ ID NO: 16048 - protein, 368 aa, Homo Sapiens
MSAQSVEEDSILIIPTPDEEEKILRVKLEEDPDGEEGSSIPWNHLPDPEIFRQRFRQFGYQDSPGPREAVSQLRELCRLWLRPETHTKEQILELVVLEQFVAILPKELQTWVRDHHPENGEEAVTVLEDLESELDDPGQPVSLRRRKREVLVEDMVSQEEAQGLPSSELDAVENQLKWASWELHSLRHCDDDGRTENGALAPKQELPSALESHEVPGTLNMGVPQIFKYGETCFPKGRFERKRNPSRKKQHICDECGKHFSQGSALILHQRIHSGEKPYGCVECGKAFSRSSILVQHQRVHTGEKPYKCLECGKAFSQNSGLINHQRIHTGEKPYECVQCGKSYSQSSNLFRHQRRHNAEKLLNVVKV

SEQ ID NO: 16049 - protein, 579 aa, Homo Sapiens
MNKSQEQVSFKDVCVDFTQEEWYLLDPAQKILYRDVILENYSNLVSVGYCITKPEVIFKIEQGEEPWILEKGFPSQCHPERKWKVDDVLESSQENEDDHFWELLFHNNKTVSVENGDRGSKTFNLGTDPVSLRNYPYKICDSCEMNLKNISGLIISKKNCSRKKPDEFNVCEKLLLDIRHEKIPIGEKSYKYDQKRNAINYHQDLSQPSFGQSFEYSKNGQGFHDEAAFFTNKRSQIGETVCKYNECGRTFIESLKLNISQRPHLEMEPYGCSICGKSFCMNLRFGHQRALTKDNPYEYNEYGEIFCDNSAFIIHQGAYTRKILREYKVSDKTWEKSALLKHQIVHMGGKSYDYNENGSNFSKKSHLTQLRRAHTGEKTFECGECGKTFWEKSNLTQHQRTHTGEKPYECTECGKAFCQKPHLTNHQRTHTGEKPYECKQCGKTFCVKSNLTEHQRTHTGEKPYECNACGKSFCHRSALTVHQRTHTGEKPFICNECGKSFCVKSNLIVHQRTHTGEKPYKCNECGKTFCEKSALTKHQRTHTGEKPYECNACGKTFSQRSVLTKHQRIHTRVKALSTS

SEQ ID NO: 16050 - protein, 456 aa, Homo Sapiens
MNKFQGPVTLKDVIVEFTKEEWKLLTPAQRTLYKDVMLENYSHLVSVGYHVNKPNAVFKLKQGKEPWILEVEFPHRGFPEDLWSIHDLEARYQESQAGNSRNGELTKHQKTHTTEKACECKECGKFFCQKSALIVHQHTHSKGKSYDCDKCGKSFSKNEDLIRHQKIHTRDKTYECKECKKIFYHLSSLSRHLRTHAGEKPYECNQCEKSFYQKPHLTEHQKTHTGEKPFECTECGKFFYVKAYLMVHQKTHTGEKPYECKECGKAFSQKSHLTVHQRMHTGEKPYKCKECGKFFSRNSHLKTHQRSHTGEKPYECKECRKCFYQKSALTVHQRTHTGEKPFECNKCGKTFYYKSDLTKHQRKHTGEKPYECTECGKSFAVNSVLRLHQRTHTGEKPYACKECGKSFSQKSHFIIHQRKHTGEKPYECQECGETFIQKSQLTAHQKTHTKKRNAEK

SEQ ID NO: 16051 - protein, 560 aa, Homo Sapiens
MAAARLLPVPAGPQPLSFQAKLTFEDVAVLLSQDEWDRLCPAQRGLYRNVMMETYGNVVSLGLPGSKPDIISQLERGEDPWVLDRKGAKKSQGLWSDYSDNLKYDHTTACTQQDSLSCPWECETKGESQNTDLSPKPLISEQTVILGKTPLGRIDQENNETKQSFCLSPNSVDHREVQVLSQSMPLTPHQAVPSGERPYMCVECGKCFGRSSHLLQHQRIHTGEKPYVCSVCGKAFSQSSVLSKHRRIHTGEKPYECNECGKAFRVSSDLAQHHKIHTGEKPHECLECRKAFTQLSHLIQHQRIHTGERPYVCPLCGKAFNHSTVLRSHQRVHTGEKPHRCNECGKTFSVKRTLLQHQRIHTGEKPYTCSECGKAFSDRSVLIQHHNVHTGEKPYECSECGKTFSHRSTLMNHERIHTEEKPYACYECGKAFVQHSHLIQHQRVHTGEKPYVCGECGHAFSARRSLIQHERIHTGEKPFQCTECGKAFSLKATLIVHLRTHTGEKPYECNSCGKAFSQYSVLIQHQRIHTGEKPYECGECGRAFNQHGHLIQHQKVHRKL

SEQ ID NO: 16052 - protein, 671 aa, Homo Sapiens
MAATFQLPGHQEMPLTFQDVAVYFSQAEGRQLGPQQRALYRDVMLENYGNVASLGFPVPKPELISQLEQGKELWVLNLLGAEEPDILKSCQKDSEVGTKKELSILNQKFSEEVKTPEFVSRRLLRDNAQAAEFREAWGREGKLKERVGNSAGQSLNKPNIHKRVLTEATVGRERSLGERTQECSAFDRNLNLDQNVVRLQRNKTGERVFKCDICSKTFKYNSDLSRHQRSHTGEKPYECGRCGRAFTHSSNLVLHHHIHTGNKPFKCDECGKTFGLNSHLRLHRRIHTGEKPFGCGECGKAFSRSSTLIQHRIIHTGEKPYKCNECGRGFSQSPQLTQHQRIHTGEKPHECSHCGKAFSRSSSLIQHERIHTGEKPHKCNQCGKAFSQSSSLFLHHRVHTGEKPYVCNECGRAFGFNSHLTEHVRIHTGEKPYVCNECGKAFRRSSTLVQHRRVHTGEKPYQCVECGKAFSQSSQLTLHQRVHTGEKPYDCGDCGKAFSRRSTLIQHQKVHSGETRKCRKHGPAFVHGSSLTADGQIPTGEKHGRAFNHGANLILRWTVHTGEKSFGCNEYGKAFSPTSRPTEDQIMHAGEKPYKCQECGNAFSGKSTLIQHQVTHTGQKPCHCSVYGKAFSQSSQLTPPQQTRVGEKPALNDGSKRYFIHIKKIFQERHF

SEQ ID NO: 16053 - protein, 211 aa, Homo Sapiens
MLRQSCSFPVTSLPALGGVCGREGAGAEVPPAACGCEGRDPDTERSCGRSSTGGCSPCSGPGPSSPRTSRGALSPSLGRLFPHLQVVIKLRIQLAPAVHLALPTCSLLTSSPPLEGCCHRLNEEAEVQRGFRPIAVELEFENQPLGAETRLRNGRRAGVKRSEGRGQVRPGQVRSTGPEGGLTRMERKAARLQWDSGSIKMSENEQLWEEP

SEQ ID NO: 16054 - protein, 499 aa, Homo Sapiens
MGPLQFRDVAIEFSLEEWHCLDTAQRNLYRDVMLENYRNLVFLGIVVSKPDLVTCLEQGKKPLTMERHEMIAKPPVMSSHFAQDLWPENIQNSFQIGMLRRYEECRHDNLQLKKGCKSVGEHKVHKGGYNGLNQCLTTTQKEIFQCDKYGKVFHKFSNSNTYKTRHTGINLFKCIICGKAFKRSSTLTTHKKIHTGEKPYRCEECGKAFNQSANLTTHKRIHTGEKPYRCEECGKAFKQSSNLTTHKKIHTGEKPYKCEECGKAFNRSTDLTTHKIVHTGEKPYKCEECGKAFKHPSHVTTHKKIHTRGKPYNCEECGKSFKHCSNLTIHKRIHTGEKPYKCEECGKAFHLSSHLTTHKILHTGEKPYRCRECGKAFNHSTTLFSHEKIHTGEKPYKCDECGKTFTWPSILSKHKRTHTGEKPYKCEECGKSFTASSTLTTHKRIHTGEKPYKCEECGKAFNWSSDLNKHKKIHIERKPYIVKNVTDLLNVPPLLISIR

SEQ ID NO: 16055 - protein, 659 aa, Homo Sapiens
MPGPPRSLEMGLLTFRDVAIEFSLEEWQHLDIAQQNLYRNVMLENYRNLAFLGIAVSKPDLITCLEQGKEPWNMKRHEMVDEPPGMCPHFAQDLWPEQGMEDSFQKAILRRYGKYGHENLQLRKGCKSVDEYKVNKEGYNGLNQCFTTAQSKVFQCDKYLKVFYKFLNSNRPKIRHTEKKSFKCKKRVKLFCMLSHKTQHKSIYHREKSYKCKECGKTFNWSSTLTNHRKIYTEEKPYKCEEYNKSPKQLSTLTTHEIIHAGEKLYKCEECGEAFNRSSNLTTHKIIHTGEKPYKCEECGKAFIWSSTLTEHKKIHTRKKPYKCEECGKAFIWSSTLTRHKRMHTGEKPYKCEECGKAFSQSSTLTTHKIIHTGEKRYKCLECGKAFKQLSTLTTHKIIHVGEKLYKCEECGKGFNRSSNLTTHKIIHTGEKPYKCEECGKAFIWSSTLTKHKRIHTREKPYKCEECGKAFIWSSTLTRHKRMHTGEKPYKCEECGKSFSQSSTLTTHKIIHTGEKPYKCEECGKAFNWSSTLTKHKIIHTEEKPYKCEKCGKAFKQSSILTNHKRIHTGEKPYKCEECGKSFNRSSTFTKHKVIHTGVKPYKCEECGKAFFWSSTLTKHKRIHTGEQPYKWEKFGKAFNRSSHLTTDKITHWREILQV

SEQ ID NO: 16056 - protein, 627 aa, Homo Sapiens
MAAAELTAPAQGIVTFEDVAVYFSWKEWGLLDEAQKCLYHDVMLENLTLTTSLGGSGAGDEEAPYQQSTSPQRVSQVRIPKALPSPQKTNPCEICGPVLRQILHLVEHQGTHHGQKLYTDGACRKQLQFTAYLHQHQKQHVGQKHFRSNGGRDMFLSSCTFEVSGKPFTCKEVGKDFLVRSRFLQQQAAHTRKKSNRTKSAVAFHSVKNHYNWGECVKAFSYKHVRVQHQGDLIRERSYMCSECGKSFSTSCSLSDHLRVHTSEKPYTCGECGKSYRQSSSLITHRRIHTGVRPHQCDECGKLFNRKYDLLIHQRVHTGERPYKCSECGKSFSHSSSLITHQRIHTGMRPYECSECGKSFIHSSSLITHQRVHTGTRPYMCSECGKSFSQSCHLIKHRRLHIGEGPYECSECGKLFTYRSRFFQHQRVHTGVRSHECHECGKLFSRKFDLIVHERVHTGERPYECSECGKSFTCKSYLISHWKVHTGARPYECGECGKSFTHSSTLLQHQRVHTGERPYECNECGKFFSQSSSLIRHRRSHTGERPYECSECWKSFSNHSSLVKHRRVHTGERPYECSECGKSFSQSSNLTNHQRIHSGERPYECSDCGKFFTFNSNLLKHQNVHKG

SEQ ID NO: 16057 - protein, 563 aa, Homo Sapiens
MGPLTIRDVTVEFSLEEWHCLDTAQQNLYRDVMLENYRNLVFLGIAVSKPDLITCLEQGKEPCNMKRHEMVAKPPVMCSHIAEDLCPERDIKYFFQKVILRRYDKCEHENLQLRKGCKSVDECKVCKGGYNGLNQCLITTQSKMYQCDKYVKVFYKFSNSDRHKIRHTEKKTCKCKECGKSFCMLSQLTRHKRIHIRENSHKCEECGKAFNQSSALTRHKMTHTGEKPYKCEECGKAFNRSSHLTQHKVIHTREKPYKCEECGKAFNRSSHITQHKRIHNREKPFKYDECCKAFKWSSALTTLTQHKRIHTGEKPYKCEECGKAFNQSSALTRHKMIHTGEKPFQCEECGKAFNRSSHLTQHKIIHTKEKPYKCEECGKAFNRSSHLTKHKRIHTREKAYKCDEYCKAFNWSSALTTLTQHKIIHTGEKPYKCEECGKAFNRSSYLIRHKIIHTGEKPYKCEECGKAFNQSSHLTQHKIIHTGEKPYKCEECGKAFNRSSHLSQHKIIHTGEKPYKCEECGKPFNRFSYLTVHKRIHAGENPNKYEECGKACNHSSNLTKHNS

SEQ ID NO: 16058 - protein, 533 aa, Homo Sapiens; identical to SEQ ID NO: 14404

SEQ ID NO: 16059 - protein, 412 aa, Homo Sapiens
MIGMLESLQHESDLLQHDQIHTGEKPYECNECRKTFSLKQNLVEHKKMHTGEKSHECTECGKVCSRVSSLTLHLRSHTGKKAYKCNKCGKAFSQKENFLSHQKHHTGEKPYECEKVSIQMPTIIRHQKNHTGTKPYACKECGKAFNGKAYLTEHEKIHTGEKPFECNQCGRAFSQKQYLIKHQNIHTGKKPFKCSECGKAFSQKENLIIHQRIHTGEKPYECKGCGKAFIQKSSLIRHQRSHTGEKPYTCKECGKAFSGKSNLTEHEKIHIGEKPYKCNECGTIFRQKQYLIKHHNIHTGEKPYECNKCGKAFSRITSLIVHVRIHTGDKPYECKVCGKAFCQSSSLTVHMRSHTGEKPYGCNECGKAFSQFSTLALHMRIHTGEKPYQCSECGKAFSQKSHHIRHQRIHTH

SEQ ID NO: 16060 - protein, 683 aa, Homo Sapiens
MASGPGSQEREGLLIVKLEEDCAWSQELPPPDPGPSPEASHLRFRRFRFQEAAGPREALSRLQELCHGWLRPEMRTKEQILELLVLEQFLTILPQEIQSRVQELHPESGEEAVTLVEDMQRELGRLRQQVTNHGRGTEVLLEEPLPLETARESPSFKLEPMETERSPGPRLQELLGPSPQRDPQAVKERALSAPWLSLFPPEGNMEDKEMTGPQLPESLEDVAMYISQEEWGHQDPSKRALSRDTVQESYENVDSLESHIPSQEVPGTQVGQGGKLWDPSVQSCKEGLSPRGPAPGEEKFENLEGVPSVCSENIHPQVLLPDQARGEVPWSPELGRPHDRSQGDWAPPPEGGMEQALAGASSGRELGRPKELQPKKLHLCPLCGKNFSNNSNLIRHQRIHAAERLCMGVDCTEIFGGNPRFLSLHRAHLGEEAHKCLECGKCFSQNTHLTRHQRTHTGEKPYQCNICGKCFSCNSNLHRHQRTHTGEKPYKCPECGEIFAHSSNLLRHQRIHTGERPYKCPECGKSFSRSSHLVIHERTHERERLYPFSECGEAVSDSTPFLTNHGAHKAEKKLFECLTCGKSFRQGMHLTRHQRTHTGEKPYKCTLCGENFSHRSNLIRHQRIHTGEKPYTCHECGDSFSHSSNRIRHLRTHTGERPYKCSECGESFSRSSRLMSHQRTHTG

SEQ ID NO: 16061 - protein, 627 aa, Homo Sapiens
MAAAVLTDRAQVSVTFDDVAVTFTKEEWGQLDLAQRTLYQEVMLENCGLLVSLGCPVPKAELICHLEHGQEPWTRKEDLSQDTCPGDKGKPKTTEPTTCEPALSEGISLQGQVTQGNSVDSQLGQAEDQDGLSEMQEGHFRPGIDPQEKSPGKMSPECDGLGTADGVCSRIGQEQVSPGDRVRSHNSCESGKDPMIQEEENNFKCSECGKVFNKKHLLAGHEKIHSGVKPYECTECGKTFIKSTHLLQHHMIHTGERPYECMECGKAFNRKSYLTQHQRIHSGEKPYKCNECGKAFTHRSNFVLHNRRHTGEKSFVCTECGQVFRHRPGFLRHYVVHSGENPYECLECGKVFKHRSYLMWHQQTHTGEKPYECSECGKVFLESAALIHHYVIHTGEKPFECLECGKAFNHRSYLKRHQRIHTGEKPFVCSECGKAFTHCSTFILHKRAHTGEKPFECKECGKAFSNRKDLIRHFSIHTGEKPYECVECGKAFTRMSGLTRHKRIHSGEKPYECVECGKSFCWSTNLIRHAIIHTGEKPYKCSECGKAFSRSSSLTQHQRMHTGKNPISVTDVGRPFTSGQTSVTLRELLLGKDFLNVTTEANILPEETSSSASDQPYQRETPQVSSL

SEQ ID NO: 16062 - protein, 549 aa, Homo Sapiens
MLENYKNLATVGYQLFKPSLISWLEQEESRTVQRGDFQASEWKVQLKTKELALQQDVLGEPTSSGIQMIGSHNGGEVSDVKQCGDVSSEHSCLKTHVRTQNSENTFECYLYGVDFLTLHKKTSTGEQRSVFSQCGKAFSLNPDVVCQRTCTGEKAFDCSDSGKSFINHSHLQGHLRTHNGESLHEWKECGRGFIHSTDLAVRIQTHRSEKPYKCKECGKGFRYSAYLNIHMGTHTGDNPYECKECGKAFTRSCQLTQHRKTHTGEKPYKCKDCGRAFTVSSCLSQHMKIHVGEKPYECKECGIAFTRSSQLTEHLKTHTAKDPFECKICGKSFRNSSCLSDHFRIHTGIKPYKCKDCGKAFTQNSDLTKHARTHSGERPYECKECGKAFARSSRLSEHTRTHTGEKPFECVKCGKAFAISSNLSGHLRIHTGEKPFECLECGKAFTHSSSLNNHMRTHSAKKPFTCMECGKAFKFPTCVNLHMRIHTGEKPYKCKQCGKSFSYSNSFQLHERTHTGEKPYECKECGKAFSSSSSFRNHERRHADERLSA

SEQ ID NO: 16063 - protein, 743 aa, Homo Sapiens
MGLLTFRDVAVEFSLEEWEHLEPAQKNLYQDVMLENYRNLVSLGLVVSKPDLITFLEQRKEPWNVKSEETVAIQPDVFSHYNKDLLTEHCTEASFQKVISRRHGSCDLENLHLRKRWKREECEGHNGCYDEKTFKYDQFDESSVESLFHQQILSSCAKSYNFDQYRKVFTHSSLLNQQEEIDIWGKHHIYDKTSVLFRQVSTLNSYRNVFIGEKNYHCNNSEKTLNQSSSPKNHQENYFLEKQYKCKEFEEVFLQSMHGQEKQEQSYKCNKCVEVCTQSLKHIQHQTIHIRENSYSYNKYDKDLSQSSNLRKQIIHNEEKPYKCEKCGDSLNHSLHLTQHQIIPTEEKPCKWKECGKVFNLNCSLYLTKQQQIDTGENLYKCKACSKSFTRSSNLIVHQRIHTGEKPYKCKECGKAFRCSSYLTKHKRIHTGEKPYKCKECGKAFNRSSCLTQHQTTHTGEKLYKCKVCSKSYARSSNLIMHQRVHTGEKPYKCKECGKVFSRSSCLTQHRKIHTGENLYKCKVCAKPFTCFSNLIVHERIHTGEKPYKCKECGKAFPYSSHLIRHHRIHTGEKPYKCKACSKSFSDSSGLTVHRRTHTGEKPYTCKECGKAFSYSSDVIQHRRIHTGQRPYKCEECGKAFNYRSYLTTHQRSHTGERPYKCEECGKAFNSRSYLTTHRRRHTGERPYKCDECGKAFSYRSYLTTHRRSHSGERPYKCEECGKAFNSRSYLIAHQRSHTREKL

SEQ ID NO: 16064 - protein, 947 aa, Homo Sapiens
MATRVRTASIWVPPLQERNSSWDRIRKLQGQESILGQGTPGLQPLPGTPRQKQKSRRIEKVLEWLFISQEQPKITKSWGPLSFMDVFVDFTWEEWQLLDPAQKCLYRSVMLENYSNLVSLGYQHTKPDIIFKLEQGEELCMVQAQVPNQTCPNTVWKIDDLMDWHQENKDKLGSTAKSFECTTFGKLCLLSTKYLSRQKPHKCGTHGKSLKYIDFTSDYARNNPNGFQVHGKSFFHSKHEQTVIGIKYCESIESGKTVNKKSQLMCQQMYMGEKPFGCSCCEKAFSSKSYLLVHQQTHAEEKPYGCNECGKDFSSKSYLIVHQRIHTGEKLHECSECRKTFSFHSQLVIHQRIHTGENPYECCECGKVFSRKDQLVSHQKTHSGQKPYVCNECGKAFGLKSQLIIHERIHTGEKPYECNECQKAFNTKSNLMVHQRTHTGEKPYVCSDCGKAFTFKSQLIVHQGIHTGVKPYGCIQCGKGFSLKSQLIVHQRSHTGMKPYVCNECGKAFRSKSYLIIHTRTHTGEKLHECNNCGKAFSFKSQLIIHQRIHTGENPYECHECGKAFSRKYQLISHQRTHAGEKPYECTDCGKAFGLKSQLIIHQRTHTGEKPFECSECQKAFNTKSNLIVHQRTHTGEKPYSCNECGKAFTFKSQLIVHKGVHTGVKPYGCSQCAKTFSLKSQLIVHQRSHTGVKPYGCSECGKAFRSKSYLIIHMRTHTGEKPHECRECGKSFSFNSQLIVHQRIHTGENPYECSECGKAFNRKDQLISHQRTHAGEKPYGCSECGKAFSSKSYLIIHMRTHSGEKPYECNECGKAFIWKSLLIVHERTHAGVNPYKCSQCEKSFSGKLRLLVHQRMHTREKPYECSECGKAFIRNSQLIVHQRTHSGEKPYGCNECGKTFSQKSILSAHQRTHTGEKPCKCTECGKAFCWKSQLIMHQRTHVDDKH

SEQ ID NO: 16065 - protein, 569 aa, Homo Sapiens
MSSAPRGPPSVAPLPAGIGRSTAKTPGLPGSLEMGPLTFRDVAIEFSLEEWQCLDTSQQNLYRNVMLDNYRNLVFLGIAVSKPDLITCLEQGKEPCNMKRHAMVAKPPVVCSHFAQDLWPKQGLKDSFQKVILRRYGKYGHENLQLRKGCKSADEHKVHKRGYNGLNQCLTTTQSKIFQCDKYVKVLHKFSNSNIHKKRQTGKKPFKCKECGKSCCILSQLTQHKKTATRVNFYKCKTCGKAFNQFSNLTKHKIIHPEVNPYKCEECGKAFNQSLTLTKHKKIHTEEKPYKCEDCGKVFSVFSVLTKHKIIHTGTKPYNCEECGKGFSIFSTLTKHKIIHTGEKPYKCNECGKAFNWSSTLTKHKRIHTGEKPYKCEECGKAFNQSSTLTRHKIVHTGEKPYKCEECGKAFKRSTTLTKHKRIYTKEKPYKCEECGKAFSVFSTLTKHKIIHTGAKPYKCEECGSAFRAFSTLTEHKRVHTGEKPYKCNECGKAFNWSSTLTKHKRIHTGEKPYKCEECGKAFNRSSNLTRHKKIHTGEKPYKPKRCDSAFDNTPNFSRHKRNHMGEKS

SEQ ID NO: 16066 - protein, 653 aa, Homo Sapiens
MASRLPTAWSCEPVTFEDVTLGFTPEEWGLLDLKQKSLYREVMLENYRNLVSVEHQLSKPDVVSQLEEAEDFWPVERGIPQDTIPEYPELQLDPKLDPLPAESPLMNIEVVEVLTLNQEVAGPRNAQIQALYAEDGSLSADAPSEQVQQQGKHPGDPEAARQRFRQFRYKDMTGPREALDQLRELCHQWLQPKARSKEQILELLVLEQFLGALPVKLRTWVESQHPENCQEVVALVEGVTWMSEEEVLPAGQPAEGTTCCLEVTAQQEEKQEDAAICPVTVLPEEPVTFQDVAVDFSREEWGLLGPTQRTEYRDVMLETFGHLVSVGWETTLENKELAPNSDIPEEEPAPSLKVQESSRDCALSSTLEDTLQGGVQEVQDTVLKQMESAQEKDLPQKKHFDNRESQANSGALDTNQVSLQKIDNPESQANSGALDTNQVLLHKIPPRKRLRKRDSQVKSMKHNSRVKIHQKSCERQKAKEGNGCRKTFSRSTKQITFIRIHKGSQVCRCSECGKIFRNPRYFSVHKKIHTGERPYVCQDCGKGFVQSSSLTQHQRVHSGERPFECQECGRTFNDRSAISQHLRTHTGAKPYKCQDCGKAFRQSSHLIRHQRTHTGERPYACNKCGKAFTQSSHLIGHQRTHNRTKRKKKQPTS

SEQ ID NO: 16067 - protein, 429 aa, Homo Sapiens
MMSHPCVSLLGVPVLNPALVPHLAQGQVLLVSDPSPNTDPAKYSESTSATRHQMKGEDAQPQEMASTSFPRASGPSPEFRQHGDSDGKRGSPQNLPIEHHFACKECGDTFRLKVLLVQHQRVHSEEKGWECGDCGKVFRGVAEFNEHRKSHVAAEPQPGPSRALENAAEKREQMEREAKPFECEECGKRFKKNAGLSQHLRVHSREKPFDCEECGRSFKVNTHLFRHQKLHTSEKPFACKACSRDFLDRQELLKHQRMHTGHLPFDCDDCGKSFRGVNGLAEHQRIHSGAKPYGCPHCGKLFRRSSELTKHRRIHTGEKPYACGQCGKAFRQSSSLLEHARIHSGERPYACGECGKAFRGPSDLIKHRRIHSGLKPYECDKCGKAFRRSSGLSRHRRIHSGARRCECSQCGRVFKRRSALQKHQPTHHE

SEQ ID NO: 16068 - protein, 614 aa, Homo Sapiens
MKRDRLGRFLSPGSSRQCGASDGGGGVSRTRGRPSLSGGPRVDGATARRAWGPVGSCGDAGEDGADEAGAGRALAMGHCRLCHGKFSSRSLRSISERAPGASMERPSAEERVLVRDFQRLLGVAVRQDPTLSPFVCKSCHAQFYQCHSLLKSFLQRVNASPAGRRKPCAKVGAQPPTGAEEGACLVDLITSSPQCLHGLVGWVHGHAASCGALPHLQRTLSSEYCGVIQVVWGCDQGHDYTMDTSSSCKAFLLDSALAVKWPWDKETAPRLPQHRGWNPGDAPQTSQGRGTGTPVGAETKTLPSTDVAQPPSDSDAVGPRSGFPPQPSLPLCRAPGQLGEKQLPSSTSDDRVKDEFSDLSEGDVLSEDENDKKQNAQSSDESFEPYPERKVSGKKSESKEAKKSEEPRIRKKPGPKPGWKKKLRCEREELPTIYKCPYQGCTAVYRGADGMKKHIKEHHEEVRERPCPHPGCNKVFMIDRYLQRHVKLIHTEVRNYICDECGQTFKQRKHLLVHQMRHSGAKPLQCEVCGFQCRQRASLKYHMTKHKAETELDFACDQCGRRFEKAHNLNVHMSMVHPLTQTQDKALPLEAEPPPGPPSPSVTTEGQAVKPEPT

SEQ ID NO: 16069 - protein, 450 aa, Homo Sapiens
MAASKTQGAVARMQEDRDGSCSTVGGVGYGDSKDCILEPLSLPESPGGTTTLEGSPSVPCIFCEEHFPVAEQDKLLKHMIIEHKIVIADVKLVADFQRYILYWRKRFTEQPITDFCSVIRINSTAPFEEQENYFLLCDVLPEDRILREELQKQRLREILEQQQQERNDTNFHGVCMFCNEEFLGNRSVILNHMAREHAFNIGLPDNIVNCNEFLCTLQKKLDNLQCLYCEKTFRDKNTLKDHMRKKQHRKINPKNREYDRFYVINYLELGKSWEEVQLEDDRELLDHQEDDWSDWEEHPASAVCLFCEKQAETIEKLYVHMEDAHEFDLLKIKSELGLNFYQQVKLVNFIRRQVHQCRCYGCHVKFKSKADLRTHMEETKHTSLLPDRKTWDQLEYYFPTYENDTLLCTLSDSESDLTAQEQNENVPIISEDTSKLYALKQSSILNQLLL

SEQ ID NO: 16070 - protein, 718 aa, Homo Sapiens
MALPQGLLTFRDVAIEFSQEEWKCLDPAQRTLYRDVMLENYRNLVSLDISSKCMMKTFFSTGQGNTEAFHTGTLQRQASHHIGDFCFQKIEKDIHGFQFQWKEDETNDHAAPMTEIKELTGSTGQHDQRHAGNKHIKDQLGLSFHSHLPELHIFQPEGKIGNQVEKSINNASSVSTSQRICCRPKTHISNKYGNNSLHSSLLTQKRNVHMREKSFQCIESGKSFNCSSLLKKHQITHLEEKQCKCDVYGKVFNQKRYLACHRRSHIDEKPYKCNECGKIFGHNTSLFLHKALHTADKPYECEECDKVFSRKSHLETHKIIYTGGKPYKCKVCDKAFTCNSYLAKHTIIHTGEKPYKCNECGKVFNRLSTLARHRRLHTGEKPYECEECEKVFSRKSHLERHKRIHTGEKPYKCKVCDKAFAYNSYLAKHSIIHTGEKPYKCNECGKVFNQQSTLARHHRLHTAEKPYKCEECDKVFRCKSHLERHRRIHTGEKPYKCKVCDKAFRSDSCLTEHQRVHTGEKPYMCNECGKVFSTKANLACHHKLHTAEKPYKCEECEKVFSRKSHMERHRRIHTGEKPYKCKVCDKAFRRDSHLAQHQRVHTGEKPYKCNECGKTFRQTSSLIIHRRLHTGEKPYKCNECGKTFSQMSSLVYHHRLHSGEKPYKCNECGKVFNQQAHLAQHQRVHTGEKPYKCNECGKTFSQMSNLVYHHRLHSGEKP

SEQ ID NO: 16071 - protein, 542 aa, Homo Sapiens
MGDIFLCKKVESPKKNLRESKQREEDDEDPDLIYVGVEHVHRDAEVLFVGMISNSKPVVSNILNRVTPGSKSRRKKGHFRQYPAHVSQPANHVTSMAKAIMPVSLSEGRSTDSPVTMKSSSEPGYKMSSPQVVSPNYSDSLPPGTQCLVGAMVSGGGRNESSPDSKRLSTSDINSRDSKRVKLRDGIPGVPSLAVVPSDMSSTISTNTPSQGICNSSNHVQNGVTFPWPDANGKAHFNLTDPERANESGLAMTDISSLASQNKTFDPKKENPIVLLSNFYYGQHKGDGQPEQKTHTTFKCLSCVKVLKNIKFMNHMKHHLEFEKQRNDSWEDHTTCQHCHRQFPTPFQLQCHIDSVHIAMGPSAVCKICELSFETDQVLLQHMKDHHKPGEMPYVCQVCHYRSSVFADVETHFRTCHENTKNLLCLFCLKLFKTAIPYMNHCWRHSRRRVLQCSKCRLQFLTLKEEIEHKTKDHQTFKKPEQLQGFPRETKVIIQTSVQPGSSGMASVIVSNTDPQSSPVKTKKKTAMNTRDSRLPCSKDSS

SEQ ID NO: 16072 - protein, 543 aa, Homo Sapiens
MEQSCEEEKEPEPQKNIQETKQVDDEDAELIFVGVEHVNEDAELIFVGVTSNSKPVVSNILNRVTPGSWSRRKKYDHLRKDTARKLQPKSHETVTSEAVTVLPASQLESRSTDSPIIIEPLSKPDYRNSSPQVVPNNSSELPSPLITFTDSLHHPVSTALSVGGINESPRVSKQLSTFEVNSINPKRAKLRDGIIEGNSSASFPSDTFHTMNTQQSTPSNNVHTSLSHVQNGAPFPAAFPKDNIHFKPINTNLDRENELAKTDILSLTSQNKTFDPKKENPIVLLSDFYYGQHKGEGQPEQKTHTTFKCLSCVKVLKNVKFMNHVKHHLEFEKQRNDSWENHTTCQHCHRQFPTPFQLQCHIENVHTAQEPSTVCKICELSFETDQVLLQHMKDHHKPGEMPYVCQVCHYRSSVFADVETHFRTCHENTKNLLCPFCLKIFKTATPYMCHYRGHWGKSAHQCSKCRLQFLTFKEKMEHKTQCHQMFKKPKQLEGLPPETKVTIQVSLEPLQPGSVDVASITVSTSDSEPSLPRSKSKISKKSH

SEQ ID NO: 16073 - protein, 737 aa, Homo Sapiens
MDDDKPFQPKNISKMAELFMECEEEELEPWQKKVEETQDEDDDELIFVGEISSSKPAISNILNRGHSSSSSKGIKSEPHSPGIPEIFRTASQRCRDPPSNPVAASPRFHLVSKSSQSSVTVENASKPDFTKNSQVGSDNSSILLFDSTQESLPPSQDIPAIFREGMKNTSYVLKHPSTSKVNSVTPKKPKTSEDVPQINPSTSLPLIGSPPVTSSQVMLSKGTNTSSPYDAGADYLRACPKCNVQFNLLDPLKYHMKHCCPDMITKFLGVIVKSERPCDEDKTDSETGKLIMLVNEFYYGRHEGVTEKEPKTYTTFKCFSCSKVLKNNIRFMNHMKHHLELEKQNNESWENHTTCQHCYRQYPTPFQLQCHIESTHTPHEFSTICKICELSFETEHILLQHMKDTHKPGEMPYVCQVCQFRSSTFSDVEAHFRAAHENTKNLLCPFCLKVSKMATPYMNHYMKHQKKGVHRCPKCRLQFLTSKEKAEHKAQHRTFIKPKELEGLPPGAKVTIRASLGPLQSKLPTAPFGCAPGTSFLQVTPPTSQNTTARNPRKSNASRSKTSKLHATTSTASKVNTSKPRGRIAKSKAKPSYKQKRQRNRKNKMSLALKNIRCRRGIHKCIECHSKIKDFASHFSIYIHCSFCKYNTNCNKAFVNHMMSSHSNHPGKRFCIFKKHSGTLRGITLVCLKCDFLADSSGLDRMAKHLSQRKTHTCQVIIENVSKSTSTSEPTTGCSLK

SEQ ID NO: 16074 - protein, 979 aa, Homo Sapiens
MGDNPFQPKSNSKMAELFMECEEEELEPWQKKVKEVEDDDDDEPIFVGEISSSKPAISNILNRVNPSSYSRGLKNGALSRGITAAFKPTSQHYTNPTSNPVPASPINFHPESRSSDSSVIVQPFSKPGYITNSSRVVSNKSSELLFDLTQDTGLSHYQGGPTLSMAGMSESSFLSKRPSTSEVNNVNPKKPKPSESVSGANSSAVLPSVKSPSVTSSQAMLAKGTNTSSNQSKNGTPFPRACPKCNIHFNLLDPLKNHMKYCCPDMINNFLGLAKTEFSSTVNKNTTIDSEKGKLIMLVNDFYYGKHEGDVQEEQKTHTTFKCFSCLKILKNNIRFMNHMKHHLELEKQSSESWENHTTCQHCYRQFPTPFQLQCHIESTHTPHEFSTICKICELSFETEHVLLQHMKDNHKPGEMPYVCQVCNYRSSSFSDVETHFRTSHENTKNLLCPFCLKVIKIATPYMHHYMKHQKKGIHRCTKCRLQFLTCKEKMDHKTQHHRTFIKPKQLEGLPPGTKVTIRASVGPLQSGASPTPSISASASTLQLSPPRTKNITAKNPAKSNTSKPNTVKSNASKPNTSKPNGSKSKYKPKISNMQKKQSTLASSNKKSKVNTALRNLRYRRGIHKCIECCSEIKDFANHFPTYVHCSFCRYNTSCSKAYVNHMMSFHSNRPSKRFCIFKKHSENLRGITLVCLNCDFLSDVSGLDNMATHLSQHKTHTCQVVMQKVSVCIPTSEHLSELKKEAPAKEQEPVSKEIARPNMAERETETSNSESKQDKAASSKEKNGCNANSFEGSSTTKSEESITVSDKENETCLADQETGSKNIVSCDSNIGADKVEKKKQIQHVCQEMELKMCQSSENIILSDQIKDHNSSEARFSSKNIKDLRLASDNVSIDQFLRKRHEPESVSSDVSEQGSIHLEPLTPSEVLEYEATEILQKGSGDPSAKTDEVVSDQTDDIPGGNNPSTTEATVDLEDEKERS

SEQ ID NO: 16075 - protein, 895 aa, Homo Sapiens
MKIGSGFLSGGGGTGSSGGSGSGGGGSGGGGGGGSSGRRAEMEPTFPQGMVMFNHRLPPVTSFTRPAGSAAPPPQCVLSSSTSAAPAAEPPPPPAPDMTFKKEPAASAAAFPSQRTSWGFLQSLVSIKQEKPADPEEQQSHHHHHHHHYGGLFAGAEERSPGLGGGEGGSHGVIQDLSILHQHVQQQPAQHHRDVLLSSSSRTDDHHGTEEPKQDTNVKKAKRPKPESQGIKAKRKPSASSKPSLVGDGEGAILSPSQKPHICDHCSAAFRSSYHLRRHVLIHTGERPFQCSQCSMGFIQKYLLQRHEKIHSREKPFGCDQCSMKFIQKYHMERHKRTHSGEKPYKCDTCQQYFSRTDRLLKHRRTCGEVIVKGATSAEPGSSNHTNMGNLAVLSQGNTSSSRRKTKSKSIAIENKEQKTGKTNESQISNNINMQSYSVEMPTVSSSGGIIGTGIDELQKRVPKLIFKKGSRKNTDKNYLNFVSPLPDIVGQKSLSGKPSGSLGIVSNNSVETIGLLQSTSGKQGQISSNYDDAMQFSKKRRYLPTASSNSAFSINVGHMVSQQSVIQSAGVSVLDNEAPLSLIDSSALNAEIKSCHDKSGIPDEVLQSILDQYSNKSESQKEDPFNIAEPRVDLHTSGEHSELVQEENLSPGTQTPSNDKASMLQEYSKYLQQAFEKSTNASFTLGHGFQFVSLSSPLHNHTLFPEKQIYTTSPLECGFGQSVTSVLPSSLPKPPFGMLFGSQPGLYLSALDATHQQLTPSQELDDLIDSQKNLETSSAFQSSSQKLTSQKEQKNLESSTGFQIPSQELASQIDPQKDIEPRTTYQIENFAQAFGSQFKSGSRVPMTFITNSNGEVDHRVRTSVSDFSGYTNMMSDVSEPCSTRVKTPTSQSYR

SEQ ID NO: 16076 - protein, 671 aa, Homo Sapiens
MQFVSTRPQPQQLGIQGLGLDSGSWSWAQALPPEEVCHQEPALRGEMAEGMPPMQAQEWDMDARRPMPFQFPPFPDRAPVFPDRMMREPQLPTAEISLWTVVAAIQAVERKVDAQASQLLNLEGRTGTAEKKLADCEKTAVEFGNHMESKWAVLGTLLQEYGLLQRRLENLENLLRNRNFWVLRLPPGSKGEAPKVPVTFVDIAVYFSEDEWKNLDEWQKELYNNLVKENYKTLMSLDAEGSVPKPDAPVQAEPREEPCVWEQRHPEEREIPMDPEAGAEPLVPAQDASSQVKREDTLCVRGQRGLEERAIPTESITDSPISAQDLLSRIKQEEHQCVWDQQDLADRDIPTDPNSESLISAHDILSWIKQEEQPYPWGPRDSMDGELGLDSGPSDSLLMVKNPPPAPPQPQPQPQPPQPQLQSQPQPQSLPPIAVAENPGGPPSRGLLDDGFQVLPGERGSGEAPPGGDRSTGGGGGDGGGGGGGAEAGTGAGGGCGSCCPGGLRRSLLLHGARSKPYSCPECGKSFGVRKSLIIHHRSHTKERPYECAECEKSFNCHSGLIRHQMTHRGERPYKCSECEKTYSRKEHLQNHQRLHTGERPFQCALCGKSFIRKQNLLKHQRIHTGERPYTCGECGKSFRYKESLKDHLRVHSGGPGPGAPRQLPPPPERD

SEQ ID NO: 16077 - protein, 679 aa, Homo Sapiens
MESRSVAQAGVQWCDLGSLQAPPPGFTLFSCLSLLSSWDYSSGFSGFCASPIEESHGALISSCNSRTMTDGLVTFRDVAIDFSQEEWECLDPAQRDLYVDVMLENYSNLVSLDLESKTYETKKIFSENDIFEINFSQWEMKDKSKTLGLEASIFRNNWKCKSIFEGLKGHQEGYFSQMIISYEKIPSYRKSKSLTPHQRIHNTEKSYVCKECGKACSHGSKLVQHERTHTAEKHFECKECGKNYLSAYQLNVHQRFHTGEKPYECKECGKTFSWGSSLVKHERIHTGEKPYECKECGKAFSRGYHLTQHQKIHTGVKSYKCKECGKAFFWGSSLAKHEIIHTGEKPYKCKECGKAFSRGYQLTQHQKIHTGKKPYECKICGKAFCWGYQLTRHQIFHTGEKPYECKECGKAFNCGSSLIQHERIHTGEKPYECKECGKAFSRGYHLSQHQKIHTGEKPFECKECGKAFSWGSSLVKHERVHTGEKSHECKECGKTFCSGYQLTRHQVFHTGEKPYECKECGKAFNCGSSLVQHERIHTGEKPYECKECGKAFSRGYHLTQHQKIHTGEKPFKCKECGKAFSWGSSLVKHERVHTNEKSYECKDCGKAFGSGYQLSVHQRFHTGEKLYQRKEFGKTFTCGSKLVHERTHSNDKPYKYNECGEAFLWTTYSNEKIDTDETL

SEQ ID NO: 16078 - protein, 593 aa, Homo Sapiens
MTMFKEAVTFKDVAVVFTEEELGLLDVSQRKLYRDVMLENFRNLLSVGHQLSHRDTFHFQREEKFWIMETATQREGNSGGKIQTELESVPETGPHEEWSCQQIWEQTASELTRPQDSISSSQFSTQGDVPSQVDAGLSIIHIGETPSEHGKCKKFFSDVSILDLHQQLHSGKISHTCNEYRKRFCYSSALCLHQKVHMGEKRYKCDVCSKAFSQNSQLQTHQRIHTGEKPFKCEQCGKSFSRRSGMYVHCKLHTGEKPHICEECGKAFIHNSQLREHQRIHTGEKPFKCYICGKSFHSRSNLNRHSMVHMQEKSFRCDTCSNSFGQRSALNSHCMDHTKEKLYKCEECGRSFTCRQDLCKHQMDHTGDKPYNCNVCGKGFRWSSCLSRHQRVHNGETTFKCDGCGKRFYMNSQGHSHQRAYREEELYKCQKCGKGYISKFNLDLHQRVHTGERPYNCKECGKSFRWASGILRHKRLHTGEKPFKCEECGKRFTENSKLRFHQRIHTGEKPYKCEECGKGFRWASTHLTHQRLHSREKLFQCEDCGKSSEHSSCLQDQQSDHSGEKTSKCEDCGKRYERRLNLDMILSLFLNDI

SEQ ID NO: 16079 - protein, 590 aa, Homo Sapiens
MIKFQERVTFKDVAVVFTKEELALLDKAQINLYQDVMLENFRNLMLVRDGIKNNILNLQAKGLSYLSQEVLHCWQIWKQRIRDLTVSQDYIVNLQEECSPHLEDVSLSEEWAGISLQISENENYVVNAIIKNQDITAWQSLTQVLTPESWRKANIMTEPQNSQGRYKGIYMEEKLYRRAQHDDSLSWTSCDHHESQECKGEDPGRHPNCGKNLGMKSTVEKRNAAHVLPQPFPCNNCGVAFADDTDPHVHHSTHLGEKSYKCDQYGKNFSQSQDLIVHCKTHSGKTPYEFHEWPMGCKQSSDLPRYQKVSSGDKPYKCKECGKGFRRSSSLHNHHRVHTGEMPYKCDECGKGFGFRSLLCIHQGVHTGKKPYKCEECGKGFDQSSNLLVHQRVHTGEKPYKCSECGKCFSSSSVLQVHWRFHTGEKPYRCGECGKGFSQCTHLHIHQRVHTGEKPYKCNVCGKDFAYSSVLHTHQRVHTGEKPYKCEVCGKCFSYSSYFHLHQRDHIREKPYKCDECGKGFSRNSDLNVHLRVHTRERPYKCKACGKGFSRNSYLLAHQRVHIDETQYTHCERGKDLLTHQRLHEQRETL

SEQ ID NO: 16080 - protein, 521 aa, Homo Sapiens
METDLAEMPEKGALSSQDSPHFQEKSTEEGEVAALRLTARSQETVTFKDVAMDFTPEEWGKLDPAQRDVMLENYRNLVSLWLPVSKPESYNLENGKEPLKLERKAPKSSYSDMETRPQSKDSTSVQDFSKAESCKVAIIDRLTRNSVYDSNLEAALECENWLENQQGNQERHLREMFTHMNSLSEETDHKHDVYWKSFNQKSVLITEDRVPKGSYAFHTLEKSLKQKSNLMKKQRTYKEKKPHKCNDCGELFTYHSVLIRHQRVHTGEKPYTCNECGKSFSHRANLTKHQRTHTRILFECSECKKTFTESSSLATHQRIHVGERPYECNECGKGFNRSTHLVQHQLIHTGVKPYECNECDKAFIHSSALIKHQRTHTGEKPYKCQECGKAFSHCSSLTKHQRVHTGEKPYECSECGKTFSQSTHLVQHQRIHTGEKPYECNECGKTFSRSSNFAKHQRIHIGKKPYKCSECGKAFIHSSALIQHQRTHTGEKPFRCNECGKSFKCSSSLIRHQRVHTEEQP

SEQ ID NO: 16081 - protein, 522 aa, Homo Sapiens
METDLAEMPEKGVLSSQDSPHFQEKSTEEGEVAALRLTARSQAAAAAAAPGSRSLRGVHVPPPLHPAPAREEIKSTCSLKACFSLSLTLTYYRTAFLLSTENEGNLHFQCPSDVETRPQSKDSTSVQDFSKAESCKVAIIDRLTRNSVYDSNLEAALECENWLEKQQGNQERHLREMFTHMNSLSEETDHEHDVYWKSFNQKSVLITEDRVPKGSYAFHTLEKSLKQKSNLMKKQRTYKEKKPHKCNDCGELFTCHSVHIQHQRVHTGEKPYTCNECGKSFSHRANLTKHQRTHTRILFECRECKKTFTESSSLATHQRIHVGERPYECNECGKGFNRSTHLVQHQLIHTGVRPYECNECDKAFIHSSALIKHQRTHTGEKPYKCQECGKAFSHCSSLTKHQRVHTGEKPYECSECGKTFSQSTHLVQHQRIHTGEKPYECSECGKTFSQSSNFAKHQRIHIGKKPYKCSECGKAFIHSSALIQHQRTHTGEKPFRCNECGKSFKCSSSLIRHQRVHTEEQP

SEQ ID NO: 16082 - protein, 754 aa, Homo Sapiens
MNSSSRSQILLRWKSDKAQSGPYNVEKEILTSRFLRDTETCRQNFRNFPYPDLAGPRKALSQLRELCLKWLRPEIHSKEQILELLVLEQFLTILPGEVRTWVKSQYPESSEEAVTLVEDLTQILEEEAPQNSTLSQDTPEEDPRGKHAFQTGWLNDLVTKESMTFKDVAVDITQEDWELMRPVQKELYKTVTLQNYWNMVSLGLTVYRPTVIPILEEPWMVIKEILEGPSPEWETKAQACTPVEDMSKLTKEETHTIKLEDSYDYDDRLERRGKGGFWKIHTDERGFSLKSVLSQEYDPTEECLSKYDIYRNNFEKHSNLIVQFDTQLDNKTSVYNEGRATFNHVSYGIVHRKILPGEKPYKCNVCGKKFRKYPSLLKHQSTHAKEKSYECEECGKEFRHISSLIAHQRMHTGEKPYECHQCGKAFSQRAHLTIHQRIHTGEKPYKCDDCGKDFSQRAHLTIHQRTHTGEKPYKCLECGKTFSHSSSLINHQRVHTGEKPYICNECGKTFSQSTHLLQHQKIHTGKKPYKCNECWKVFSQSTYLIRHQRIHSGEKCYKCNECGKAFAHSSTLIQHQTTHTGEKSYICNICGKAFSQSANLTQHHRTHTGEKPYKCSVCGKAFSQSVHLTQHQRIHNGEKPFKCNICGKAYRQGANLTQHQRIHTGEKPYKCNECGKAFIYSSSLNQHQRTHTGERPYKCNECDKDFSQRTCLIQHQRIHTGEKPYACRICGKTFTQSTNLIQHQRVHTGAKHRN

SEQ ID NO: 16083 - protein, 2723 aa, Homo Sapiens
MADEEAEQERLSCGEGGCVAELQRLGERLQELELQLRESRVPAVEAATDYCQQLCQTLLEYAEKWKTSEDPLPLLEVYTVAIQSYVKARPYLTSECENVALVLERLALSCVELLLCLPVELSDKQWEQFQTLVQVAHEKLMENGSCELHFLATLAQETGVWKNPVLCTILSQEPLDKDKVNEFLAFEGPILLDMRIKHLIKTNQLSQATALAKLCSDHPEIGIKGSFKQTYLVCLCTSSPNGKLIEEISEVDCKDALEMICNLESEGDEKSALVLCTAFLSRQLQQGDMYCAWELTLFWSKLQQRVEPSIQVYLERCRQLSLLTKTVYHIFFLIKVINSETEGAGLATCIELCVKALRLESTENTEVKISICKTISCLLPDDLEVKRACQLSEFLIEPTVDAYYAVEMLYNQPDQKYDEENLPIPNSLRCELLLVLKTQWPFDPEFWDWKTLKRQCLALMGEEASIVSSIDELNDSEVYEKVVDYQEESKETSMNGLSGGVGANSGLLKDIGDEKQKKREIKQLRERGFISARFRNWQAYMQYCVLCDKEFLGHRIVRHAQKHYKDGIYSCPICAKNFNSKETFVPHVTLHVKQSSKERLAAMKPLRRLGRPPKITTTNENQKTNTVAKQEQRPIKKNSLYSTDFIVFNDNDGSDDENDDKDKSYEPEVIPVQKPVPVNEFNCPVTFCKKGFKYFKNLIAHVKGHKDNEDAKRFLEMQSKKVICQYCRRHFVSVTHLNDHLQMHCGSKPYICIQMKCKAGFNSYAELLTHRKEHQVFRAKCMFPKCGRIFSEAYLLYDHEAQHYNTYTCKFTGCGKVYRSQGELEKHLDDHSTPPEKVLPPEAQLNSSGDSIQPSEVNQNTAENIEKERSMLPSENNIENSLLADRSDAWDKSKAESAVTKQDQISASELRQANGPLSNGLENPATTPLLQSSEVAVSIKVSLNQGIEDNFGKQENSTVEGSGEALVTDLHTPVEDTCNDLCHPGFQERKEQDCFNDAHVTQNSLVNSETLKIGDLTPQNLERQVNNLMTFSVQNQAAFQNNLPTSKFECGDNVKTSSNLYNLPLKTLESIAFVPPQSDLSNSLGTPSVPPKAPVQKFSCQVEGCTRTYNSSQSIGKHMKTAHPDQYAAFKMQRKSKKGQKANNLNTPNNGKFVYFLPSPVNSSNPFFTSQTKANGNPACSAQLQHVSPPIFPAHLASVSTPLLSSMESVINPNITSQDKNEQGGMLCSQMENLPSTALPAQMEDLTKTVLPLNIDSGSDPFLPLPAESSSMSLFPSPADSGTNSVFSQLENNTNHYSSQIEGNTNSSFLKGGNGENAVFPSQVNVANNFSSTNAQQSAPEKVKKDRGRGPNGKERKPKHNKRAKWPAIIRDGKFICSRCYRAFTNPRSLGGHLSKRSYCKPLDGAEIAQELLQSNGQPSLLASMILSTNAVNLQQPQQSTFNPEACFKDPSFLQLLAENRSPAFLPNTFPRSGVTNFNTSVSQEGSEIIKQALETAGIPSTFEGAEMLSHVSTGCVSDASQVNATVMPNPTVPPLLHTVCHPNTLLTNQNRTSNSKTSSIEECSSLPVFPTNDLLLKTVENGLCSSSFPNSGGPSQNFTSNSSRVSVISGPQNTRSSHLNKKGNSASKRRKKVAPPLIAPNASQNLVTSDLTTMGLIAKSVEIPTTNLHSNVIPTCEPQSLVENLTQKLNNVNNQLFMTDVKENFKTSLESHTVLAPLTLKTENGDSQMMALNSCTTSINSDLQISEDNVIQNFEKTLEIIKTAMNSQILEVKSGSQGAGETSQNAQINYNIQLPSVNTVQNNKLPDSSPFSSFISVMPTKSNIPQSEVSHKEDQIQEILEGLQKLKLENDLSTPASQCVLINTSVTLTPTPVKSTADITVIQPVSEMINIQFNDKVNKPFVCQNQGCNYSAMTKDALFKHYGKIHQYTPEMILEIKKNQLKFAPFKCVVPTCTKTFTRNSNLRAHCQLVHHFTTEEMVKLKIKRPYGRKSQSENVPASRSTQVKKQLAMTEENKKESQPALELRAETQNTHSNVAVIPEKQLVEKKSPDKTESSLQVITVTSEQCNTNALTNTQTKGRKIRRHKKEKEEKKRKKPVSQSLEFPTRYSPYRPYRCVHQGCFAAFTIQQNLILHYQAVHKSDLPAFSAEVEEESEAGKESEETETKQTLKEFRCQVSDCSRIFQAITGLIQHYMKLHEMTPEEIESMTASVDVGKFPCDQLECKSSFTTYLNYVVHLEADHGIGLRASKTEEDGVYKCDCEGCDRIYATRSNLLRHIFNKHNDKHKAHLIRPRRLTPGQENMSSKANQEKSKSKHRGTKHSRCGKEGIKMPKTKRKKKNNLENKNAKIVQIEENKPYSLKRGKHVYSIKARNDALSECTSRFVTQYPCMIKGCTSVVTSESNIIRHYKCHKLSKAFTSQHRNLLIVFKRCCNSQVKETSEQEGAKNDVKDSDTCVSESNDNSRTTATVSQKEVEKNEKDEMDELTELFITKLINEDSTSVETQANTSSNVSNDFQEDNLCQSERQKASNLKRVNKEKNVSQNKKRKVEKAEPASAAELSSVRKEEETAVAIQTIEEHPASFDWSSFKPMGFEVSFLKFLEESAVKQKKNTDKDHPNTGNKKGSHSNSRKNIDKTAVTSGNHVCPCKESETFVQFANPSQLQCSDNVKIVLDKNLKDCTELVLKQLQEMKPTVSLKKLEVHSNDPDMSVMKDISIGKATGRGQY

SEQ ID NO: 16084 - protein, 475 aa, Homo Sapiens
MSRRKAGSAPRRVEPAPAANPDDEMEMQDLVIELKPEPDAQPQQAPRLGPFSPKEVSSAGRFGGEPHHSPGPMPAGAALLALGPRNPWTLWTPLTPNYPDRQPWTDKHPDLLTCGRCLQTFPLEAITAFMDHKKLGCQLFRGPSRGQGSEREELKALSCLRCGKQFTVAWKLLRHAQWDHGLSIYQTESEAPEAPLLGLAEVAAAVSAVVGPAAEAKSPRASGSGLTRRSPTCPVCKKTLSSFSNLKVHMRSHTGERPYACDQCPYACAQSSKLNRHKKTHRQVPPQSPLMADTSQEQASAAPPEPAVHAAAPTSTLPCSGGEGAGAAATAGVQEPGAPGSGAQAGPGGDTWGAITTEQRTDPANSQKASPKKMPKSGGKSRGPGGSCEFCGKHFTNSSNLTVHRRSHTGERPYTCEFCNYACAQSSKLNRHRRMHGMTPGSTRFECPHCHVPFGLRATLDKHLRQKHPEAAGEA

SEQ ID NO: 16085 - protein, 446 aa, Homo Sapiens
METQADLVSQEPQALLDSALPSKVPAFSDKDSLGDEMLAAALLKAKSQELVTFEDVAVYFIRKEWKRLEPAQRDLYRDVMLENYGNVFSLDRETRTENDQEISEDTRSHGVLLGRFQKDISQGLKFKEAYEREVSLKRPLGNSPGERLNRKMPDFGQVTVEEKLTPRGERSEKYNDFGNSFTVNSNLISHQRLPVGDRPHKCDECSKSFNRTSDLIQHQRIHTGEKPYECNECGKAFSQSSHLIQHQRIHTGEKPYECSDCGKTFSCSSALILHRRIHTGEKPYECNECGKTFSWSSTLTHHQRIHTGEKPYACNECGKAFSRSSTLIHHQRIHTGEKPYECNECGKAFSQSSHLYQHQRIHTGEKPYECMECGGKFTYSSGLIQHQRIHTGENPYECSECGKAFRYSSALVRHQRIHTGEKPLNGIGMSKSSLRVTTELNIREST

SEQ ID NO: 16086 - protein, 623 aa, Homo Sapiens
MAHKYVGLQYHGSVTFEDVAIAFSQQEWESLDSSQRGLYRDVMLENYRNLVSMGHSRSKPHVIALLEQWKEPEVTVRKDGRRWCTDLQLEDDTIGCKEMPTSENCPSFALHQKISRQKPRECQEYGKTLCQDSKPVQHERIHSSEKPNRCKECGKNFSNGHQLTIHQRLHVGEKPYKYEKCGKAFISGSAFVKHGRIHTGEKPLKCKQCGKTISGSYQLTVHKSIHTGKKPYECGECGKAFLVYGKLTRHQSTHTGEKPFGCEECGKAFSTFSYLVQHQRIHTSEKPYECKECGKAFSTSSPLAKHQRIHTGEKPYECKECGKSFTVYGQLTRHQSIHTGEKPFECKECGKAFRLSSFLHAHQRIHAEIKPYGCKECGRTFSRASYLVQHGRLHTGEKPYECKECGKAFSTGSYLVQHQRIHTGEKPYECKECGKAFISRHQLTVHQRVHTGEKPYECKECGKAFRVHVHLTQHRKIHTDVKPYECKECGKTFSRASYLVQHSRIHTGKKPYECKECGKAFSSGSYLVQHQRIHTGEKPYECNKCGKAFTVYGQLIGHQSVHTGEKPFECKECGKAFRLNSFLTEHQRVHTGEKPFKCKKCGKTFRYSSALKVHLRKHMSVIP

SEQ ID NO: 16087 - protein, 604 aa, Homo Sapiens
MMKSQGLVSFKDVAVDFTQEEWQQLDPSQRTLYRDVMLENYSHLVSMGYPVSKPDVISKLEQGEEPWIIKGDISNWIYPDEYQADGRQDRKSNLHNSQSCILGTVSFHHKILKGVTRDGSLCSILKVCQGDGQLQRFLENQDKLFRQVTFVNSKTVTEASGHKYNPLGKIFQECIETDISIQRFHKYDAFKKNLKPNIDLPSCYKSNSRKKPDQSFGGGKSSSQSEPNSNLEKIHNGVIPFDDNQCGNVFRNTQSLIQYQNVETKEKSCVCVTCGKAFAKKSQLIVHQRIHTGKKPYDCGACGKAFSEKFHLVVHQRTHTGEKPYDCSECGKAFSQKSSLIIHQRVHTGEKPYECSECGKAFSQKSPLIIHQRIHTGEKPYECRECGKAFSQKSQLIIHHRAHTGEKPYECTECGKAFCEKSHLIIHKRIHTGEKPYKCAQCEEAFSRKTELITHQLVHTGEKPYECTECGKTFSRKSQLIIHQRTHTGEKPYKCSECGKAFCQKSHLIGHQRIHTGEKPYICTECGKAFSQKSHLPGHQRIHTGEKPYICAECGKAFSQKSDLVLHQRIHTGERPYQCAICGKAFIQKSQLTVHQRIHTVVKS

SEQ ID NO: 16088 - protein, 478 aa, Homo Sapiens
MSQVTFSDVAIDFSHEEWACLDSAQRDLYKDVMVQNYENLVSVGLSVTKPYVIMLLEDGKEPWMMEKKLSKAYPFPLSHSVPASVNFGFSALFEHCSEVTEIFELSELCVFWVLHFLSNSPNSTVEAFSRSKKKKKKKKKRQCFAFLIYFRLGIKMGKQGIINKEGYLYEDSPQPVTMEKVVKQSYEFSNSNKNLEYTECDTFRSTFHSKSTLSEPQNNSAEGNSHKYDILKKNLSKKSVIKSERINGGKKLLNSNKSGAAFNQSKSLTLPQTCNREKIYTCSECGKAFGKQSILSRHWRIHTGEKPYECRECGKTFSHGSSLTRHQISHSGEKPYKCIECGKAFSHGSSLTNHQSTHTGEKPYECMNCGKSFSRVSLLIQHLRIHTQEKRYECRICGKAFIHSSSLIHHQKSHTGEKPYECRECGKAFCCSSHLTQHQRIHSMKKKYECNKCLKVFSSFSFLVQHQSIHTEEKPFEV

SEQ ID NO: 16089 - protein, 659 aa, Homo Sapiens
MAAAVLMDRVQSCVTFEDVFVYFSREEWELLEEAQRFLYRDVMLENFALVATLGFWCEAEHEAPSEQSVSVEGVSQVRTAESGLFQKAHPCEMCDPLLKDILHLAEHQGSHLTQKLCTRGLCRRRFSFSANFYQHQKQHNGENCFRGDDGGASFVKSCTVHMLGRSFTCREEGMDLPDSSGLFQHQTTYNRVSPCRRTECMESFPHSSSLRQHQGDYDGQMLFSCGDEGKAFLDTFTLLDSQMTHAEVRPFRCLPCGNVFKEKSALINHRKIHSGEISHVCKECGKAFIHLHHLKMHQKFHTGKRHYTCSECGKAFSRKDTLVQHQRVHTGERSYDCSECGKAYSRSSHLVQHQRIHTGERPYKCNKCGKAFSRKDTLVQHQRFHTGERPYECSECGKFFSQSSHLIEHWRIHTGARPYECIECGKFFSHNSSLIKHRRVHTGARSYVCSKCGKAFGCKDTLVQHQIIHTGARPYECSECGKAFSRKDTLVQHQKIHTGERPYECGECGKFFSHSSNLIVHQRIHTGAKPYECNECGKCFSHNSSLILHQRVHTGARPYVCSECGKAYISSSHLVQHKKVHTGARPYECSECGKFFSRNSGLILHQRVHTGEKPYVCSECGKAYSRSSHLVRHQKAHTGERAHECNSFGGPLAASLKLV

SEQ ID NO: 16090 - protein, 666 aa, Homo Sapiens
MQEVVLLDESSGPPSQLLWTRQDTQLPQESALLPAPYPAFTKDGSQGNLPQADITLMSQAQESVTFEDVAVNFTNREWQCLTYAQRHLYKDVMLENYGNMVSLGFPFPKPPLISHLEREVDPCVQDPQDRESLSCSYPVSADKMWPENEKASSQQEIFENGEAYWMKFNSLLKVDSRDPKVREVCVQDVKLENQWETSIREKLREEKEGSEEVTCKKGKNQKVLSKNLNPNSKHSQCNKVLIAQKLHECARCGKNFSWHSDLILHEQIHSGEKPHVCNECGKAFKTRNQLSMHRIIHTGEKPFNCTQCGKAFNSRSALCRHKKTHSGEKPHECRDCGKAFKTRNRLCMHQLIHTGEKPYKCNCCGKAFQFKHSLTIHGRIHTGEKPYECEECGKAFSGSSDLTKHIRIHTGERPYECSKCGRAFSRSSDLSKHKRIHTREKHYGCPQCGKDFSIKAELTKHRRIHTEEKRYRCEECGKAFRHNCKRRAHEREHTGEKPYQCRDCGKTFQDKHCLTIHQRIHTGEKPYKCLECGKAFSGKSNLTNHRRIHTGEKPHKCEVCGMAFHHSSVLRQHKRIHTGEKPYTCSECGTSFRQGSALIGHKRVHTGEKPYECEECGKAFRVSSNLTGHKKRKHQVWSTHELDGSRKSLSPVTVSQTSVVSILTSA

SEQ ID NO: 16091 - protein, 1004 aa, Homo Sapiens
MAALHTTPDSPAAQLERAEDGSECDPDQEEEEEEEEKGEEVQEVEEEEEEIVVEEEEEGVAEVVQDAQVEAVAEVEVEADVEEEDVKEVLAEEECPALGTQERLSRGGDAKSPVLQEKGLQASRAPATPRDEDLEEEEEEEEDEDEDDLLTAGCQELVTFEDVAVYFSLEEWERLEADQRGLYQEVMQENYGILVSLGYPIPKPDLIFRLEQGEEPWVPDSPRPEEGDIVTGVYTGAWFWTDDIEDHEEEDDEDFLAEVAEEENEPPGLWSAAYGVGDVPGTWGPDDSDSAQTPEGWGPDPGGLGVLADGSEAKPFLPGREPGANLLSPWAFPAAVAPPAGRPETTCDVCGKVFPHRSRLAKHQRYHAAVKPFGCEECGKGFVYRSHLAIHQRTHTGEKPFPCPDCGKRFVYKSHLVTHRRIHTGERPYRCAFCGAGFGRRSYLVTHQRTHTGERPYPCSHCGRSFSQSSALARHQAVHTADRPHCCPDCGQAFRLRADFQRHRRGGGCAEAGGDGPRREPGETAAAAGPEDTDPGPEGSEVGEADGEAEAAAEEREEAAVAAPTPSGKVDPAPERRFLELGNGLGEGEGPSSHPLGFHFPVHPKSWLHPDSFPILGLPDFRERLPVDGRPLPAPLGGPLSLVEGTGLACDPFGGGGAAGGGGGLRAFGPAIGGLLAEPAPAALAEEESPWICSDCGKTFGRRAALAKHQRYHAGERPHRCADCGKSFVYGSHLARHRRTHTGERPFPCPECGARFARGSHLAAHVRGHTGEKPFVCGVCGAGFSRRAHLTAHGRAHTGERPYACGECGRRFGQSAALTRHQWAHAEEKPHRCPDCGKGFGHSSDFKRHRRTHTGEKPFRCADCGRGFAQRSNLAKHRRGHTGERPFPCPECGKRFSQRSVLVTHQRTHTGERPYACANCGRRFSQSSHLLTHMKTHRGATAAPGSGSAPAPAPKPEAAAKGPSSAGPGERGSALLEFAGGTSFGSEHQAAFAGPSGAYREGVL

SEQ ID NO: 16092 - protein, 595 aa, Homo Sapiens
MAALSPTFATSTQDSTCLQDSEFPVSSKDHSCPQNLDLFVCSGLEPHTPSVGSQESVTFQDVAVDFTEKEWPLLDSSQRKLYKDVMLENYSNLTSLGYQVGKPSLISHLEQEEEPRTEERGAHQGACADWETPSKTKWSLLMEDIFGKETPSGVTMERAGLGEKSTEYAHLFEVFGMDPHLTQPMGRHAGKRPYHRRDYGVAFKGRPHLTQHMSMYDGRKMHECHQCQKAFTTSASLTRHRRIHTGEKPYECSDCGKAFNDPSALRSHARTHLKEKPFDCSQCGNAFRTLSALKIHMRVHTGERPYKCDQCGKAYGRSCHLIAHKRTHTGERPYECHDCGKAFQHPSHLKEHVRNHTGEKPYACTQCGKAFRWKSNFNLHKKNHMVEKTYECKECGKSFGDLVSRRKHMRIHIVKKPVECRQCGKTFRNQSILKTHMNSHTGEKPYGCDLCGKAFSASSNLTAHRKIHTQERRYECAACGKVFGDYLSRRRHMSVHLVKKRVECRQCGKAFRNQSTLKTHMRSHTGEKPYECDHCGKAFSIGSNLNVHRRIHTGEKPYECLVCGKAFSDHSSLRSHVKTHRGEKLFVSSVWKRLQ

SEQ ID NO: 16093 - protein, 2279 aa, Homo Sapiens
MYRSSARSSVSSHRPKDDGGGGPRSGRSSGSSSGPARRSSPPPPPSGSSSRTPARRPRSPSGHRGRRASPSPPRGRRVSPSPPRARRGSPSPPRGRRLFPPGPAGFRGSSRGESRADYARDGRGDHPGDSGSRRRSPGLCSDSLEKSLRITVGNDHFCVSTPERRRLSDRLGSPVDNLEDMDRDDLTDDSVFTRSSQCSRGLERYISQEEGPLSPFLGQLDEDYRTKETFLHRSDYSPHISCHDELLRGTERNREKLKGYSIRSEERSREAKRPRYDDTVKINSMGGDHPSFTSGTRNYRQRRRSPSPRFLDPEFRELDLARRKREEEEERSRSLSQELVGVDGGGTGCSIPGLSGVLTASEPGYSLHRPEEVSVMPKKSILKKRIEVDIMEPSMQLESFSSSTSSSQDHPLYSGHPSLPLSGAIAAFASEIENKGTMVETALKEPQGNLYQWGPLPGIPKDNSPLREKFGSFLCHKDNLDLKAEGPERHTDFLLPHERASQDGSGFSRILSMLADSTSTQEKRRRSFPDIEDEEKFLYGDEEEDLKAESVPKPLGSSESEVMRQKASSLPSSAPAVKLESLEETNPEYAKIHDLLKTIGLDIGVAEISQLAARTQERLHGKKPSLRSSADRRSSVDRYFSADHCSSVDHRFSADRCSSVDHCFSADRRSSDPHRLESREAHHSNTHSPEVSHPHPPSPVDPYLLTKNSPPFLKSDHPVGHISGPEVVGSGFQSSVAVRCMLPSAPSAPIRLPHTAALSQFHMPRASQFAAARIPPNYQGPAIPPASFDAYRHYMAYAASRWPMYPTSQPSNHPVPEPHRIMPITKQATRSRPNLRVIPTVTPDKPKQKESLRGSIPAAQVPVQVSIPSLIRYNPEKISDEKNRASQKQKVIEEREKLKNDREARQKKMYYLRTELERLHKQQGEMLRKKRREKDGHKDPLLVEVSRLQDNIMKDIAELRQEAEEAEKKQSELDKVAQILGINIFDKSQKSLSDSREPTEKPGKAEKSKSPEKVSSFSNSSSNKESKVNNEKFRTKSPKPAESPQSATKQLDQPTAAYEYYDAGNHWCKDCNTICGTMFDFFTHMHNKKHTQTLDPYNRPWASKTQSEAKQDAIKRTDKITVPAKGSEFLVPISGFYCQLCEEFLGDPISGEQHVKGHQHNEKYKKYVDENPLYEERRNLDRQAGLAVVLETERRRQSELKRKLSEKPKEEKKEKKAKAVKEVKEDDKVSEKLEDQLSEGRNSPEKAENKRNTGIKLQLKEEVKKESPTSSSFGKFSWKKPEKEEEKSSLVTPSISKEEILESSKDKEDGKTEAGKAKPIKIKLSGKTVVAHTSPWMPVVTTSTQTKIRPNLPIPSTVLRKSCSATMSKPAPLNTFLSIKSSGTTAKPLPVVKESSADLLLPPDIISKAFGGEEVILKGSPEEKVVLAEKSEPSHLPEQILPPPPPPPPPPPPPPPVIPHPAAPSAAQANAILAPVKSNPVVSQTLSPGFVGPNILNPVLPVAIMASAQPAAIPSDETAPGVSESDRDQTLFSVLVRPPPPLSSVFSEQAKKLEKRNSCLATANAKDLYDIFYSSGGKGAPETKGAPETKLSGGPLANGENSNLSRTKSSDTSSTSPLNSSASQEELHQDEGLVAAPIVSNSEKPIAKTLVALGKWSVVEHVGPKSTGSTYGFLQPLTRLCQSRPYETITPKTDTLAIWTSSSFQSDTSRDISPEKSELDLGEPGPPGVEPPPQLLDIQCKESQKLVEIHLRESVNQDKESQELRKSEDCRESEIETNTELKERVKELSEGIVDEGVSTSIGPHSIDDSNLNHGNRYMWEGEVKQPNLLMIDKEAEQSNKLMTGSETPSKVVIKLSPQACSFTKAKLDSFLSEARSLLNPQDTPVKISAPELLLHSPARSAMCLTGSPQEQGVSVVSEEGLENSAPESASRTSRYRSLKLKRERSKDFQVKKIYELAVWDENKKRPETWESPEKPKTEALELQDVHPELTVTIESKALEDFEATDLKVEELTALGNLGDMPVDFCTTRVSPAHRSPTVLCQKVCEENSVSPIGCNSSDPADFEPIPSFSGFPLDSPKTLVLDFETEGERNSPNPRSVRIPSPNILKTGLTENVDRGLGGLEGTHQALDLLAGGMMPEEVKESSQLDKQESLGLELKTINSAGLGPSPCLPDLVDFVTRTSGVQKDKLCSPLSEPGDPSKCSSLELGPLQLEISNASTTEVAILQVDDDSGDPLNLVKAPVSRSPPREQVIEDNMVPQGMPEQETTVGAIQDHTESSVHN

SEQ ID NO: 16094 - protein, 582 aa, Homo Sapiens
MSESWQQPPQTQPQQPQPPQPQHHAEPPPALAEHTLPPGTAENPLGCAVYGILLQPDPGLQPPQHAPLQAAGEPGPKCGVCGHDLAHLSSPHEHQCLAGHDRSFQCTQCLKIFHQATDLLEHQCVQAEQKPFVCGVCKMGFSLLTSLAQHHSSHSGLVKCSICEKTYKPAEAAEPATTAAPSLPAAPAPSTVTPAEQADKPYSCPICQKPFKHLSELSRHERIHTGEKPYKCTLCDKSFSQSSHLVHHKRTHSSERPYKCAVCEKTFKHRSHLVRHMYAHSGEHHLFRCNVCELHFKESSELLQHPCTPSGERPFRCGECQKAFKRPSDLRQHERTHSAERPFKCDLCPMGFKQQYALMRHRRTHKTEEPFKCGLCEKGFGQPSHLLYHQHVHTLETLFKCPVCQKGFDQSAELLRHKCLPGAAERPFKCPVCNKAYKRASALQKHQLAHCAAAEKPLRCTLCERRFFSSSEFVQHRCDPAREKPLKCPDCEKRFKYASDLQRHRRVHTGEKPYKCPNCDKAFKQREHLNKHQGVHAREQQFKCVWCGERFLDVALLQEHSAQHSAAAAAAEGAYQVAACLP

SEQ ID NO: 16095 - protein, 273 aa, Homo Sapiens
MFGFPTATLLDCHGRYAQNVAFFNVMTEAHHKYDHSEATGSSSWDIQNSFRREKLEQKSPDSKTLQEDSPGVRQRVYECQECGKSFRQKGSLTLHERIHTGQKPFECTHCGKSFRAKGNLVTHQRIHTGEKPYQCKECGKSFSQRGSLAVHERLHTGQKPYECAICQRSFRNQSNLAVHRRVHSGEKPYRCDQCGKAFSQKGSLIVHIRVHTGLKPYACTQCRKSFHTRGNCILHGKIHTGETPYLCGQCGKSFTQRGSLAVHQRSCSQRLTL

SEQ ID NO: 16096 - protein, 509 aa, Homo Sapiens
MALSQGLLTFRDVAIEFSQEEWKCLDPAQRTLYRDVMLENYRNLVSLDISSKCMMNTLSSTGQGNTEVIHTGTLQRQASYHIGAFCSQEIEKDIHDFVFQWQEDETNDHEAPMTEIKKLTSSTDRYDQRHAGNKPIKGQLESRFHLHLRRHRRIHTGEKPYKCEECEKVFSCKSHLEIHRIIHTGEKPYKCKVCDKAFKHDSHLAKHTRIHRGDKHYTCNECGKVFDQKATLACHHRSHTGEKPYKCNECGKTFSQTSHLVYHHRLHTGEKPYKCNECGKTFARNSVLVIHKAVHTAEKPYKCNECGKVFKQRATLAGHRRVHTGEKPYRCEECDKVFSRKSHLERHRRIHTGEKPYKCKVCDKAFRSDSRLAEHQRVHTGERPYTCNECGKVFSTKAYLACHQKLHTGEKLYECEECDKVYIRKSHLERHRRIHTGEKPHKCGDCGKAFNSPSHLIRHQRIHTGQKSYKCHQCGKVFSLRSLLAEHQKIPFGDNCFKCNEYSKPSSIN

SEQ ID NO: 16097 - protein, 402 aa, Homo Sapiens
MYTSEEKCNQRTQKRKIYNVCPRKGKKIFIHMHEIIQIDGHIYQCLECKQNFCENLALIMCERTHTGEKPYKCDMCEKTFVQSSDLTSHQRIHNYEKPYKCSKCEKSFWHHLALSGHQRTHAGKKFYTCDICGKNFGQSSDLLVHQRSHTGEKPYLCSECDKCFSRSTNLIRHRRTHTGEKPFKCLECEKAFSGKSDLISHQRTHTGERPYKCNKCEKSYRHRSAFIVHKRVHTGEKPYKCGACEKCFGQKSDLIVHQRVHTGEKPYKCLECMRSFTRSANLIRHQATHTHTFKCLEYEKSFNCSSDLIVHQRIHMEEKPHQWSACESGFLLGMDFVAQQKMRTQTEELHYKYTVCDKSFHQSSALLQHQTVHIGEKPFVCNVSEKGLELSPPHASEASQMS

SEQ ID NO: 16098 - protein, 553 aa, Homo Sapiens
MAFEDVAVYFSQEEWGLLDTAQRALYRRVMLDNFALVASLGLSTSRPRVVIQLERGEEPWVPSGTDTTLSRTTYRRRNPGSWSLTEDRDVSGEWPRAFPDTPPGMTTSVFPVAGACHSVKSLQRQRGASPSRERKPTGVSVIYWERLLLGSGSGQASVSLRLTSPLRPPEGVRLREKTLTEHALLGRQPRTPERQKPCAQEVPGRTFGSAQDLEAAGGRGHHRMGAVWQEPHRLLGGQEPSTWDELGEALHAGEKSFECRACSKVFVKSSDLLKHLRTHTGERPYECAQCGKAFSQTSHLTQHQRIHSGETPYACPVCGKAFRHSSSLVRHQRIHTAEKSFRCSECGKAFSHGSNLSQHRKIHAGGRPYACAQCGRRFCRNSHLIQHERTHTGEKPFVCALCGAAFSQGSSLFKHQRVHTGEKPFACPQCGRAFSHSSNLTQHQLLHTGERPFRCVDCGKAFAKGAVLLSHRRIHTGEKPFVCTQCGRAFRERPALFHHQRIHTGEKTVRRSRASLHPQARSVAGASSEGAPAKETEPTPASGPAAVSQPAEV

SEQ ID NO: 16099 - protein, 544 aa, Homo Sapiens
MTFEDVAVYFSQEEWGLLDTAQRALYRHVMLENFTLVTSLGLSTSRPRVVIQLERGEEPWVPSGKDMTLARNTYGRLNSGSWSLTEDRDVSGEWPRAFPDTPPGMTTSVFPVADACHSVKSLQRQPGASPSQERKPTGVSVIYWERLLLGSRSDQASISLRLTSPLRPPKSSRPREKTFTEYRVPGRQPRTPERQKPCAQEVPGRAFGNASDLKAASGGRDRRMGAAWQEPHRLLGGQEPSTWDELGEALHAGEKSFECRACSKVFVKSSDLLKHLRTHTGERPYECTQCGKAFSQTSHLTQHQRIHSGETPYACPVCGKAFRHSSSLVRHQRIHTAEKSFRCSECGKAFSHGSNLSQHRKIHAGGRPYACAQCGRRFCRNSHLIQHERTHTGEKPFVCALCGAAFSQGSSLFLHQRVHTGEKPFACAQCGRSFSRSSNLTQHQLLHTGERPFRCVDCGKGFAKGAVLLSHRRIHTGEKPFVCTQCGRAFRERPALLHHQRIHTTEKTNAAAPDCTPGPGFLQGHHRKVRRGGKPSPVLKPAKV

SEQ ID NO: 16100 - protein, 582 aa, Homo Sapiens
MDFEDDYTHSACRNTYQGFNGMDRDYGPGSYGGMDRDYGHGSYGGQRSMDSYLNQSYGMDNHSGGGGGSRFGPYESYDSRSSLGGRDLYRSGYGFNEPEQSRFGGSYGGRFESSYRNSLDSFGGRNQGGSSWEAPYSRSKLRPGFMEDRGRENYSSYSSFSSPHMKPAPVGSRGRGTPAYPESTFGSRNYDAFGGPSTGRGRGRGHMGDFGSIHRPGIVVDYQNKSTNVTVAAARGIKRKMMQPFNKPSGTFIKKPKLAKPMEKISLSKSPTKTDPKNEEEEKRRIEARREKQRRRREKNSEKYGDGYRMAFTCSFCKFRTFEEKDIELHLESSSHQETLDHIQKQTKFDKVVMEFLHECMVNKFKKTSIRKQQTNNQTEVVKIIEKDVMEGVTVDDHMMKVETVHCSACSVYIPALHSSVQQHLKSPDHIKGKQAYKEQIKRESVLTATSILNNPIVKARYERFVKGENPFEIQDHSQDQQIEGDEEDEEKIDEPIEEEEDEDEEEEAEEVGEVEEVEEVEEVREGGIEGEGNIQGVGEGGEVGVVGEVEGVGEVEEVEELEEETAKEEPADFPVEQPEEN

SEQ ID NO: 16101 - protein, 541 aa, Homo Sapiens
MRLKMTTRNFPEREVPCDVEVERFTREVPCLSSLGDGWDCENQEGHLRQSALTLEKPGTQEAICEYPGFGEHLIASSDLPPSQRVLATNGFHAPDSNVSGLDCDPALPSYPKSYADKRTGDSDACGKGFNHSMEVIHGRNPVREKPYKYPESVKSFNHFTSLGHQKIMKRGKKSYEGKNFENIFTLSSSLNENQRNLPGEKQYRCTECGKCFKRNSSLVLHHRTHTGEKPYTCNECGKSFSKNYNLIVHQRIHTGEKPYECSKCGKAFSDGSALTQHQRIHTGEKPYECLECGKTFNRNSSLILHQRTHTGEKPYRCNECGKPFTDISHLTVHLRIHTGEKPYECSKCGKAFRDGSYLTQHERTHTGEKPFECAECGKSFNRNSHLIVHQKIHSGEKPYECKECGKTFIESAYLIRHQRIHTGEKPYGCNQCQKLFRNIAGLIRHQRTHTGEKPYECNQCGKAFRDSSCLTKHQRIHTKETPYQCPECGKSFKQNSHLAVHQRLHSREGPSRCPQCGKMFQKSSSLVRHQRAHLGEQPMET

SEQ ID NO: 16102 - protein, 463 aa, Homo Sapiens
MAQGLVTFADVAIDFSQEEWACLNSAQRDLYWDVMLENYSNLVSLDLESAYENKSLPTEKNIHEIRASKRNSDRRSKSLGRNWICEGTLERPQRSRGRYVNQMIINYVKRPATREGTPPRTHQRHHKENSFECKDCGKAFSRGYQLSQHQKIHTGEKPYECKECKKAFRWGNQLTQHQKIHTGEKPYECKDCGKAFRWGSSLVIHKRIHTGEKPYECKDCGKAFRRGDELTQHQRFHTGEKDYECKDCGKTFSRVYKLIQHKRIHSGEKPYECKDCGKAFICGSSLIQHKRIHTGEKPYECQECGKAFTRVNYLTQHQKIHTGEKPHECKECGKAFRWGSSLVKHERIHTGEKPYKCTECGKAFNCGYHLTQHERIHTGETPYKCKECGKAFIYGSSLVKHERIHTGVKPYGCTECGKSFSHGHQLTQHQKTHSGAKSYECKECGKACNHLNHLREHQRIHNS

SEQ ID NO: 16103 - protein, 665 aa, Homo Sapiens
MESVTFEDVAVEFIQEWALLDSARRSLCKYRMLDQCRTLASRGTPPCKPSCVSQLGQRAEPKATERGILRATGVAWESQLKPEELPSMQDLLEEASSRDMQMGPGLFLRMQLVPSIEERETPLTREDRPALQEPPWSLGCTGLKAAMQIQRVVIPVPTLGHRNPWVARDSAVPARDPAWLQEDKVEEEAMAPGLPTACSQEPVTFADVAVVFTPEEWVFLDSTQRSLYRDVMLENYRNLASVADQLCKPNALSYLEERGEQWTTDRGVLSDTCAEPQCQPQEAIPSQDTFTEILSIDVKGEQPQPGEKLYKYNELEKPFNSIEPLFQYQRIHAGEASCECQEIRNSFFQSAHLIVPEKIRSGDKSYACNKCEKSFRYSSDLIRHEKTHTAEKCFDCQECGQAFKYSSNLRRHMRTHTGEKPFECSQCGKTFTRNFNLILHQRNHTGEKPYECKDCGKAFNQPSSLRSHVRTHTGEKPFECSQCGKAFREHSSLKTHLRTHTREKPYECNQCGKPFRTSTHLNVHKRIHTGEKLYECATCGQVLSRLSTLKSHMRTHTGEKPYVCQECGRAFSEPSSLRKHARTHSGKKPYACQECGRAFGQSSHLIVHVRTHSAGRPYQCNQCEKAFRHSSSLTVHKRTHVGRETIRNGSLPLSMSHPYCGPLAN

SEQ ID NO: 16104 - protein, 680 aa, Homo Sapiens
MKMKKFQIPVSFQDLTVNFTQEEWQQLDPAQRLLYRDVMLENYSNLVSVGYHVSKPDVIFKLEQGEEPWIVEEFSNQNYPDIDDALEKNKEIQDKHLTQTVFFSNKTLITERENVFGKTLNLGMNSVPSRKMPYKCNPGGNSLKTNSEVIVAKKSKENRKIPDGYSGFGKHEKSHLGMKKYRYNPMRKASNQNENLILHQNIQILKQPFDYNKCGKTFFKRAILITQKGRQTERKPNECNECRKTFSKRSTLIVHQRIHTGEKPYVCSDCRKTFRVKTSLTRHRRIHTGERPYECSECRKTFIDKSALIVHQKIHGGEKSYECNECGKTFFRKSALAEHFRSHTGEKPYECKECGNAFSKKSYLVVHQRTHRGEKPNECKECGKTFFCQSALTAHQRIHTGEKPYECSECEKTFFCQSALNVHRRSHTGEKPYECSQCGKFLCTKSALIAHQITHRGKKSYECNECGKFFCHKSTLTIHQRTHTGEKHGVFNKCGRISIVKSNCSQCKRMNTKENLYECSEHGHAVSKNSHLIVHQRTIWERPYECNECGRTYCRKSALTHHQRTHTGQRPYECNECGKTFCQKFSFVEHQRTHTGEKPYECNECGKSFCHKSAFRVHRRIHTGEKPYECNQCGKTYRRLWTLTEHQKIHTGEKPYECNKCEKTFRHKSNFLLHQKSHKE

SEQ ID NO: 16105 - protein, 1342 aa, Homo Sapiens
MEENEVESSSDAAPGPGRPEEPSESGLGVGTSEAVSADSSDAAAAPGQAEADDSGVGQSSDRGSRSQEEVSESSSSADPLPNSYLPDSSSVSHGPVAGVTGGPPALVHSSALPDPNMLVSDCTASSSDLGSAIDKIIESTIGPDLIQNCITVTSAEDGGAETTRYLILQGPDDGAPMTSPMSSSTLAHSLAAIEALADGPTSTSTCLEAQGGPSSPVQLPPASGAEEPDLQSLEAMMEVVVVQQFKCKMCQYRSSTKATLLRHMRERHFRPVAAAAAAAGKKGRLRKWSTSTKSQEEEGPEEEDDDDIVDAGAIDDLEEDSDYNPAEDEPRGRQLRLQRPTPSTPRPRRRPGRPRKLPRLEISDLPDGVEGEPLVSSQSGQSPPEPQDPEAPSSSGPGHLVAMGKVSRTPVEAGVSQSDAENAAPSCPDEHDTLPRRRGRPSRRFLGKKYRKYYYKSPKPLLRPFLCRICGSRFLSHEDLRFHVNSHEAGDPQLFKCLQCSYRSRRWSSLKEHMFNHVGSKPYKCDECSYTSVYRKDVIRHAAVHSRDRKKRPDPTPKLSSFPCPVCGRVYPMQKRLTQHMKTHSTEKPHMCDKCGKSFKKRYTFKMHLLTHIQAVANRRFKCEFCEFVCEDKKALLNHQLSHVSDKPFKCSFCPYRTFREDFLLSHVAVKHTGAKPFACEYCHFSTRHKKNLRLHVRCRHASSFEEWGRRHPEEPPSRRRPFFSLQQIEELKQQHSAAPGPPPSSPGPPEIPPEATTFQSSEAPSLLCSDTLGGATIIYQQGAEESTAMATQTALDLLLNMSAQRELGGTALQVAVVKSEDVEAGLASPGGQPSPEGATPQVVTLHVAEPGGGAAAESQLGPPDLPQITLAPGPFGGTGYSVITAPPMEEGTSAPGTPYSEEPAGEAAQAVVVSDTLKEAGTHYIMATDGTQLHHIELTADGSISFPSPDALASGAKWPLLQCGGLPRDGPEPPSPAKTHCVGDSQSSASSPPATSKALGLAVPPSPPSAATAASKKFSCKICAEAFPGRAEMESHKRAHAGPGAFKCPDCPFSARQWPEVRAHMAQHSSLRPHQCSQCSFASKNKKDLRRHMLTHTKEKPFACHLCGQRFNRNGHLKFHIQRLHSPDGRKSGTPTARAPTQTPTQTIILNSDDETLATLHTALQSSHGVLGPERLQQALSQEHIIVAQEQTVTNQEEAAYIQEITTADGQTVQHLVTSDNQVQYIISQDGVQHLLPQEYVVVPEGHHIQVQEGQITHIQYEQGAPFLQESQIQYVPVSPGQQLVTQAQLEAAAHSAVTAVADAAMAQAQGLFGTDETVPEHIQQLQHQGIEYDVITLADD

SEQ ID NO: 16106 - protein, 751 aa, Homo Sapiens
MGPQGARRQAFLAFGDVTVDFTQKEWRLLSPAQRALYREVTLENYSHLVSLGILHSKPELIRRLEQGEVPWGEERRRRPGPCAGIYAEHVLRPKNLGLAHQRQQQLQFSDQSFQSDTAEGQEKEKSTKPMAFSSPPLRHAVSSRRRNSVVEIESSQGQRENPTEIDKVLKGIENSRWGAFKCAERGQDFSRKMMVIIHKKAHSRQKLFTCRECHQGFRDESALLLHQNTHTGEKSYVCSVCGRGFSLKANLLRHQRTHSGEKPFLCKVCGRGYTSKSYLTVHERTHTGEKPYECQECGRRFNDKSSYNKHLKAHSGEKPFVCKECGRGYTNKSYFVVHKRIHSGEKPYRCQECGRGFSNKSHLITHQRTHSGEKPFACRQCKQSFSVKGSLLRHQRTHSGEKPFVCKDCERSFSQKSTLVYHQRTHSGEKPFVCRECGQGFIQKSTLVKHQITHSEEKPFVCKDCGRGFIQKSTFTLHQRTHSEEKPYGCRECGRRFRDKSSYNKHLRAHLGEKRFFCRDCGRGFTLKPNLTIHQRTHSGEKPFMCKQCEKSFSLKANLLRHQWTHSGERPFNCKDCGRGFILKSTLLFHQKTHSGEKPFICSECGQGFIWKSNLVKHQLAHSGKQPFVCKECGRGFNWKGNLLTHQRTHSGEKPFVCNVCGQGFSWKRSLTRHHWRIHSKEKPFVCQECKRGYTSKSDLTVHERIHTGERPYECQECGRKFSNKSYYSKHLKRHLREKRFCTGSVGEASS

SEQ ID NO: 16107 - protein, 810 aa, Homo Sapiens
MNKVEQKSQESVSFKDVTVGFTQEEWQHLDPSQRALYRDVMLENYSNLVSVGYCVHKPEVIFRLQQGEEPWKQEEEFPSQSFPVWTADHLKERSQENQSKHLWEVVFINNEMLTKEQGDVIGIPFNVDVSSFPSRKMFCQCDSCGMSFNTVSELVISKINYLGKKSDEFNACGKLLLNIKHDETHTQEKNEVLKNRNTLSHHEETLQHEKIQTLEHNFEYSICQETLLEKAVFNTQKRENAEENNCDYNEFGRTLCDSSSLLFHQISPSRDNHYEFSDCEKFLCVKSTLSKPHGVSMKHYDCGESGNNFRRKLCLSHLQKGDKGEKHFECNECGKAFWEKSHLTRHQRVHTGQKPFQCNECEKAFWDKSNLTKHQRSHTGEKPFECNECGKAFSHKSALTLHQRTHTGEKPYQCNACGKTFCQKSDLTKHQRTHTGLKPYECYECGKSFRVTSHLKVHQRTHTGEKPFECLECGKSFSEKSNLTQHQRIHIGDKSYECNACGKTFYHKSLLTRHQIIHTGWKPYECYECGKTFCLKSDLTVHQRTHTGQKPFACPECGKFFSHKSTLSQHYRTHTGEKPYECHECGKIFYNKSYLTKHNRTHTGEKPYECNECGKAFYQKSQLTQHQRIHIGEKPYKCNECGKAFCHKSALIVHQRTHTQEKPYKCNECGKSFCVKSGLIFHERKHTGEKPYECNECGKFFRHKSSLTVHHRAHTGEKSCQCNECGKIFYRKSELAQHQRSHTGEKPYECNTCRKTFSQKSNLIVHQRRHIGENLMNEMDIRNFQPQVSLHNASEYSHCGESPDDILNVQ

SEQ ID NO: 16108 - protein, 778 aa, Homo Sapiens
MNKVDQKFQGSVSFKDVTVGFTQEEWQHLDPSQRALYRDVMLENYSNLVSVGYCAHKPEVIFRLEQGEEPWRLEEEFPSQSFPEVWTADHLKERSQENQSKHLWEVVFINNEMLTKEQGNVIGIPFNMDVSSFPSRKMFCQYDSRGMSFNTVSELVISKINYLGKKSDEFNACGKLLLNIKHDETHTREKNEVLKNRNTLSHRENTLQHEKIQTLDHNFEYSICQETLLEKAVFNTRKRENAEENNCDYNEFGRTFCDSSSLLFHQIPPSKDSHYEFSDCEKFLCVKSTLSKHDGVPVKHYDCGESGNNFRRKLCLSQLQKGDKGEKHFECNECGKAFWEKSHLTRHQRVHTGEKHFQCNQCGKTFWEKSNLTKHQRSHTGEKPFECNECGKAFSHKSALTLHQRTHTGEKPYQCNACGKTFYQKSDLTKHQRTHTGQKPYECYECGKSFCMNSHLTVHQRTHTGEKPFECLECGKSFCQKSHLTQHQRTHIGDKPYECNACGKTFYHKSVLTRHQIIHTGLKPYECYECGKTFCLKSDLTIHQRTHTGEKPFACPECGKFFSHKSTLSQHYRTHTGEKPYECHECGKIFYNKSYLTKHNRTHTGEKPYECNECGKTFCQKSQLTQHQRIHIGEKPYECNECGKAFCHKSALIVHQRTHTQEKPYKCNECGKSFCVKSGLILHERKHTGEKPYECNECGKSFSHKSSLTVHHRAHTGEKSCQCNECGKIFYRKSDLAKHQRSHTGEKPYECNTCRKTFSQKSNLIVHQRTHIGEKPYE

SEQ ID NO: 16109 - protein, 560 aa, Homo Sapiens; identical to SEQ ID NO: 14410

SEQ ID NO: 16110 - protein, 854 aa, Homo Sapiens
MAQAIFEALEGMDNQTVLAVQSLLDGQGAVPDPTGQSVNAPPAIQPLDDEDVFLCGKCKKQFNSLPAFMTHKREQCQGNAPALATVSLATNSIYPPSAAPTAVQQAPTPANRQISTYITVPPSPLIQTLVQGNILVSDDVLMSAMSAFTSLDQPMPQGPPPVQSSLNMHSVPSYLTQPPPPPPPPPPLPPPPPPQPPPPPPQSLGPPGRPNPGGNGVVEVYSAAAPLAGSGTVEIQALGMQPYPPLEVPNQCVEPPVYPTPTVYSPGKQGFKPKGPNPAAPMTSATGGTVATFDSPATLKTRRAKGARGLPEAAGKPKAQKLKCSYCDKSFTKNFDLQQHIRSHTGEKPFQCIACGRAFAQKSNVKKHMQTHKVWPPGHSGGTVSRNSVTVQVMALNPSRQEDEESTGLGQPLPGAPQPQALSTAGEEEGDKPESKQVVLIDSSYLCQFCPSKFSTYFQLKSHMTQHKNEQVYKCVVKSCAQTFPKLDTFLEHIKSHQEELSYRCHLCGKDFPSLYDLGVHQYSHSLLPQHSPKKDNAVYKCVKCVNKYSTPEALEHHLQTATHNFPCPHCQKVFPCERYLRRHLPTHGSGGRFKCQVCKKFFRREHYLKLHAHIHSGEKPYKCSVCESAFNRKDKLKRHMLIHEPFKKYKCPFSTHTGCSKEFNRPDKLKAHILSHSGMKLHKCALCSKSFSRRAHLAEHQRAHTGNYKFRCAGCAKGFSRHKYLKDHRCRLGPQKDKDLQTRRPPQRRAAPRSCGSGGRKVLTPLPDPLGLEELKDTGAGLVPEAVPGKPPFAEPDAVLSIVVGGAVGAETELVVPGHAEGLGSNLALAELQAGAEGPCAMLAVPVYIQASE

SEQ ID NO: 16111 - protein, 599 aa, Homo Sapiens
MMLPYPSALGDQYWEEILLPKNGENVETMKKLTQNHKAKGLPSNDTDCPQKKEGKAQIVVPVTFRDVTVIFTEAEWKRLSPEQRNLYKEVMLENYRNLLSLAEPKPEIYTCSSCLLAFSCQQFLSQHVLQIFLGLCAENHFHPGNSSPGHWKQQGQQYSHVSCWFENAEGQERGGGSKPWSARTEERETSRAFPSPLQRQSASPRKGNMVVETEPSSAQRPNPVQLDKGLKELETLRFGAINCREYEPDHNLESNFITNPRTLLGKKPYICSDCGRSFKDRSTLIRHHRIHSMEKPYVCSECGRGFSQKSNLSRHQRTHSEEKPYLCRECGQSFRSKSILNRHQWTHSEEKPYVCSECGRGFSEKSSFIRHQRTHSGEKPYVCLECGRSFCDKSTLRKHQRIHSGEKPYVCRECGRGFSQNSDLIKHQRTHLDEKPYVCRECGRGFCDKSTLIIHERTHSGEKPYVCGECGRGFSRKSLLLVHQRTHSGEKHYVCRECRRGFSQKSNLIRHQRTHSNEKPYICRECGRGFCDKSTLIVHERTHSGEKPYVCSECGRGFSRKSLLLVHQRTHSGEKHYVCRECGRGFSHKSNLIRHQRTH

SEQ ID NO: 16112 - protein, 488 aa, Homo Sapiens
MENLTKHSIECSSFRGDWECKNQFERKQGSQEGHFSEMIFTPEDMPTFSIQHQRIHTDEKLLECKECGKDFSFVSVLVRHQRIHTGEKPYECKECGKAFGSGANLAYHQRIHTGEKPFECKECGKAFGSGSNLTHHQRIHTGEKPYECKECGKAFSFGSGLIRHQIIHSGEKPYECKECGKSFSFESALIRHHRIHTGEKPYECIDCGKAFGSGSNLTQHRRIHTGEKPYECKACGMAFSSGSALTRHQRIHTGEKPYICNECGKAFSFGSALTRHQRIHTGEKPYVCKECGKAFNSGSDLTQHQRIHTGEKPYECKECEKAFRSGSKLIQHQRMHTGEKPYECKECGKTFSSGSDLTQHHRIHTGEKPYECKECGKAFGSGSKLIQHQLIHTGERPYECKECGKSFSSGSALNRHQRIHTGEKPYECKECGKAFYSGSSLTQHQRIHTGEKLYECKNCGKAYGRDSEFQQHKKSHNGKKLCELETIN

SEQ ID NO: 16113 - protein, 294 aa, Homo Sapiens
MEYPAPATVQAADGGAAGPYSSSELLEGQEPDGVRFDRERARRLWEAVSGAQPVGREEVEHMIQKNQCLFTNTQCKVCCALLISESQKLAHYQSKKHANKVKRYLAIHGMETLKGETKKLDSDQKSSRSKDKNQCCPICNMTFSSPVVAQSHYLGKTHAKNLKLKQQSTKVEALHQNREMIDPDKFCSLCHATFNDPVMAQQHYVGKKHRKQETKLKLMARYGRLADPAVTDFPAGKGYPCKTCKIVLNSIEQYQAHVSGFKHKNQSPKTVASSLGQIPMQRQPIQKDSTTLED

SEQ ID NO: 16114 - protein, 839 aa, Homo Sapiens
MALTQGQVTFRDVAIEFSQEEWTCLDPAQRTLYRDVMLENYRNLASLGISCFDLSIISMLEQGKEPFTLESQVQIAGNPDGWEWIKAVITALSSEFVMKDLLHKGKSNTGEVFQTVMLERQESQDIEGCSFREVQKNTHGLEYQCRDAEGNYKGVLLTQEGNLTHGRDEHDKRDARNKLIKNQLGLSLQSHLPELQLFQYEGKIYECNQVEKSFNNNSSVSPPQQMPYNVKTHISKKYLKDFISSLLLTQGQKANNWGSPYKSNGCGMVFPQNSHLASHQRSHTKEKPYKCYECGKAFRTRSNLTTHQVIHTGEKRYKCNECGKVFSRNSQLSQHQKIHTGEKPYKCNECGKVFTQNSHLVRHRGIHTGEKPYKCNECGKAFRARSSLAIHQATHSGEKPYKCNECGKVFTQNSHLTNHWRIHTGEKPYKCNECGKAFGVRSSLAIHLVIHTGEKPYKCHECGKVFRRNSHLARHQLIHTGEKPYKCNECGKAFRAHSNLTTHQVIHTGEKPYKCNECGKVFTQNSHLANHQRIHTGVKPYMCNECGKAFSVYSSLTTHQVIHTGEKPYKCNECGKVFTQNSHLARHRGIHTGEKPYKCNECGKVFRHNSYLSRHQRIHTGEKPYKYNEYGKAFSEHSNLTTHQVIHTGEKPYKCNECGKVFTQNSHLARHRRVHTGGKPYQCNECGKAFSQTSKLARHQRVHTGEKPYECNQCGKAFSVRSSLTTHQAIHTGKKPYKCNECGKVFTQNSHLARHRGIHTGEKPYKCNECGKAFSQTSKLARHQRIHTGEKPYECGKPFSICSSLTTHQTIHTGGKPYKCNVWKVLKSEFKPCKPSQNS

SEQ ID NO: 16115 - protein, 527 aa, Homo Sapiens
MTAELREAMALAPWGPVKVKKEEEEEENFPGQASSQQVHSENIKVWAPVQGLQTGLDGSEEEEKGQNISWDMAVVLKATQEAPAASTLGSYSLPGTLAKSEILETHGTMNFLGAETKNLQLLVPKTEICEEAEKPLIISERIQKADPQGPELGEACEKGNMLKRQRIKREKKDFRQVIVNDCHLPESFKEEENQKCKKSGGKYSLNSGAVKNPKTQLGQKPFTCSVCGKGFSQSANLVVHQRIHTGEKPFECHECGKAFIQSANLVVHQRIHTGQKPYVCSKCGKAFTQSSNLTVHQKIHSLEKTFKCNECEKAFSYSSQLARHQKVHITEKCYECNECGKTFTRSSNLIVHQRIHTGEKPFACNDCGKAFTQSANLIVHQRSHTGEKPYECKECGKAFSCFSHLIVHQRIHTAEKPYDCSECGKAFSQLSCLIVHQRIHSGDLPYVCNECGKAFTCSSYLLIHQRIHNGEKPYTCNECGKAFRQRSSLTVHQRTHTGEKPYECEKCGAAFISNSHLMRHHRTHLVE

SEQ ID NO: 16116 - protein, 532 aa, Homo Sapiens
MIQAQESITLEDVAVDFTWEEWQLLGAAQKDLYRDVMLENYSNLVAVGYQASKPDALFKLEQGEQLWTIEDGIHSGACSDIWKVDHVLERLQSESLVNRRKPCHEHDAFENIVHCSKSQFLLGQNHDIFDLRGKSLKSNLTLVNQSKGYEIKNSVEFTGNGDSFLHANHERLHTAIKFPASQKLISTKSQFISPKHQKTRKLEKHHVCSECGKAFIKKSWLTDHQVMHTGEKPHRCSLCEKAFSRKFMLTEHQRTHTGEKPYECPECGKAFLKKSRLNIHQKTHTGEKPYICSECGKGFIQKGNLIVHQRIHTGEKPYICNECGKGFIQKTCLIAHQRFHTGKTPFVCSECGKSCSQKSGLIKHQRIHTGEKPFECSECGKAFSTKQKLIVHQRTHTGERPYGCNECGKAFAYMSCLVKHKRIHTREKQEAAKVENPPAERHSSLHTSDVMQEKNSANGATTQVPSVAPQTSLNISGLLANRNVVLVGQPVVRCAASGDNRGFAQDRNLVNAVNVVVPSVINYVLFYVTENP

SEQ ID NO: 16117 - protein, 605 aa, Homo Sapiens
MAAGQREARPQVSLTFEDVAVLFTRDEWRKLAPSQRNLYRDVMLENYRNLVSLGLPFTKPKVISLLQQGEDPWEVEKDGSGVSSLGSKSSHKTTKSTQTQDSSFQGLILKRSNRNVPWDLKLEKPYIYEGRLEKKQDKKGSFQIVSATHKKIPTIERSHKNTELSQNFSPKSVLIRQQILPREKTPPKCEIQGNSLKQNSQLLNQPKITADKRYKCSLCEKTFINTSSLRKHEKNHSGEKLFKCKECSKAFSQSSALIQHQITHTGEKPYICKECGKAFTLSTSLYKHLRTHTVEKSYRCKECGKSFSRRSGLFIHQKIHAEENPCKYNPGRKASSCSTSLSGCQRIHSRKKSYLCNECGNTFKSSSSLRYHQRIHTGEKPFKCSECGRAFSQSASLIQHERIHTGEKPYRCNECGKGFTSISRLNRHRIIHTGEKFYNCNECGKALSSHSTLIIHERIHTGEKPCKCKVCGKAFRQSSALIQHQRMHTGERPYKCNECGKTFRCNSSLSNHQRIHTGEKPYRCEECGISFGQSSALIQHRRIHTGEKPFKCNTCGKTFRQSSSRIAHQRIHTGEKPYECNTCGKLFNHRSSLTNHYKIHIEEDP

SEQ ID NO: 16118 - protein, 612 aa, Homo Sapiens
MAAGQREARPQVSLTFEDVAVLFTWDEWRKLAPSQRNLYRDVMLENYRNLVSLGLSFTKPKVISLLQQGEDPWEVEKDSSGVSSLGCKSTPKMTKSTQTQDSFQEQIRKRLKRDEPWNFISERSCIYEEKLKKQQDKNENLQIISVAHTKILTVDRSHKNVEFGQNFYLKSVFIKQQRFAKEKTPSKCEIQRNSFKQNSNLLNQSKIKTAEKRYKCSTCEKAFIHNSSLRKHQKNHTGEKLFKCKECLKAFSQSSALIQHQRTHTGEKPYICKECGKAFSHSASLCKHLRTHTVEKCYRCKECGKSFSRRSGLFIHQKIHAQENPHKYNPGRKASSYSTSLSGSQKIHLRKKSYLCNECGNTFKSSSSLRYHQRIHTGEKPFKCSECGRAFSQSASLIQHERIHTGEKPYRCNECGKGFTSISRLNRHRIIHTGEKLYNCNECGKALSSHSTLIIHERIHTGEKPCKCKVCGKAFRQSSALIQHQRMHTGERPYKCNECDKTFRCNSSLSNHQRIHTGEKPYRCLECGMSFGQSAALIQHQRIHTGEKPFKCNTCGKTFRQSSSLIAHQRIHTGEKPYECNACGKLFSQRSSLTNHYKIHIEEDSLKADLHV

SEQ ID NO: 16119 - protein, 554 aa, Homo Sapiens [sequence omitted]

SEQ ID NO: 16120 - protein, 428 aa, Homo Sapiens
MRDEVAEKEKADINVTLVFQGYENTPIMVCVDGIVFSKPDLVTCLEQRKKPWSMKHPGLTQHNIVHTGDKPYKCKDCGKIFKWSSNLTIHQRIHSGEKPYKCEECGKAFKQSSKLNEHMRAHTGEKFYKCEECGKAFKHPSGLTLHKRIHTGENPYKFEECDKAFYWVLSFTKHMIIHRGEKPYKYQECGKAFKWSSNLTIHKRIHTGEKPCKCEECGKACKQSLGLTIQKRIHTEEKPYKCEECGSSNLTIYKKIHAGEKPYNCEKCGKAFYCSSNLIQNNIVHAEEKHYKCQECGKAFKKSLDLNVHKIIHSGEKPYRYEECGKITHSGEESYKCEECGKGFYCSSSLTKHMIVHTEEKLYKCEECGKAFKWSSELTIHQRIRTEEKPYKCEECVRVFKHSSKLNEHKRNHTGEKPYKCEACGKAF

SEQ ID NO: 16121 - protein, 568 aa, Homo Sapiens
MRRSVLVRNPGHKGLRPVYEELDSDSEDLDPNPEDLDPVSEDPEPDPEDLNTVPEDVDPSYEDLEPVSEDLDPDAEAPGSEPQDPDPMSSSFDLDPDVIGPVPLILDPNSDTLSPGDPKVDPISSGLTATPQVLATSPAVLPAPASPPRPFSCPDCGRAFRRSSGLSQHRRTHSGEKPYRCPDCGKSFSHGATLAQHRGIHTGARPYQCAACGKAFGWRSTLLKHRSSHSGEKPHHCPVCGKAFGHGSLLAQHLRTHGGPRPHKCPVCAKGFGQGSALLKHLRTHTGERPYPCPQCGKAFGQSSALLQHQRTHTAERPYRCPHCGKAFGQSSNLQHHLRIHTGERPYACPHCSKAFGQSSALLQHLHVHSGERPYRCQLCGKAFGQASSLTKHKRVHEGAAAAAAAAAAAAAAAAAGLGLGPGLSPASMMRPGQVSLLGPDAVSVLGSGLGLSPGTSSGRNPDPGSGPGTLPDPSSKPLPGSRSTPSPTPVESSDPKAGHDAGPDLVPSPDLDPVPSPDPDPVPSPDPNPVSCPDPCSPTRGTVSPALPTGESPEWVQEQGALLGPDG

SEQ ID NO: 16122 - protein, 420 aa, Homo Sapiens
MSRSSPSGKGHSRMAEPRFNNPYFWPPPPTMPSQLDNLVLINKIKEQLMAEKIRPPHLPPTSASSQQPLLVPPAPAESSQAVMSLPKLQQVPGLHPQAVPQPDVALHARPATSTVTGLGLSTRTPSVSTSESSAGAGTGTGTSTPSTPTTTSQSRLIASSPTLISGITSPPLLDSIKTIQGHGLLGPPKSERGRKKIKAENPGGPPVLVVPYPILASGETAKEGKTYRCKVCPLTFFTKSEMQIHSKSHTEAKPHKCPHCSKSFANASYLAQHLRIHLGVKPYHCSYCDKSFRQLSHLQQHTRIHTGDRPYKCPHPGCEKAFTQLSNLQSHQRQHNKDKPYKCPNCYRAYSDSASLQIHLSAHAIKHAKAYCCSMCGRAYTSETYLMKHMSKHTVVEHLVSHHSPQRTESPGIPVRISLI

SEQ ID NO: 16123 - protein, 216 aa, Homo Sapiens
MSALGQITITVSRCWNTERNQTDKNPCLHGAYLQLRETVKNKSTHLKKPLMKQAPPWKDHLTFQPLHPAERKTQVWRWQSGNSSDLETTSSASPWPTGSNRDVVLNTLAESCCGLSELITAPPYAGVSIQGFSQIWVLFPFCGGTFHHNEKDVLGLQDFERESVSTSQSRNISLLTLGQLQNCVIGKLTIIDLLTEHLLGVRHGVICFPWGLPSSS

SEQ ID NO: 16124 - protein, 407 aa, Homo Sapiens
MQQKAFEESRYPWQESFENVAVCLPLRCPRCGDHTRFRSLSSLRAHLEFSHSYEERTLLTKCSLFPSLKDTDLVTSSELLKPGKLQSSGNVVKQKPSYVNLYSISHEHSKDRKPFEVVAERPVSYVQTYTAMDLHADSLDGTRSGPGLPTSDTKASFEAHVREKFNRMVEAVDRTIEKRIDKLTKELAQKTAELLEVRAAFVQLTQKKQEVQRRERALNRQVDVAVEMIAVLRQRLTESEEELLRKEEEVVTFNHFLEAAAEKEVQGKARLQDFIENLLQRVELAEKQLEYYQSQQASGFVRDLSGHVLTDISSNRKPKCLSRGHPHSVCNHPDLKAHFHPKGRNHLKKAKDDRASMQPAKAIHEQAESSRDLCRPPKKGELLGFGRKGNIRPKMAKKKPTAIVNII

SEQ ID NO: 16125 - protein, 744 aa, Homo Sapiens
MQKEMKMIKDEDVHFDLAVKKTPSFPHCLQPVASRGKAPQRHPFPEALRGPFSQFRYEPPPGDLDGFPGVFEGAGSRKRKSMPTKMPYNHPAEEVTLALHSEENKNHGLPNLPLLFPQPPRPKYDSQMIDLCNVGFQFYRSLEHFGGKPVKQEPIKPSAVWPQPTPTPFLPTPYPYYPKVHPGLMFPFFVPSSSPFPFSRHTFLPKQPPEPLLPRKAEPQESEETKQKVERVDVNVQIDDSYYVDVGGSQKRWQCPTCEKSYTSKYNLVTHILGHSGIKPHACTHCGKLFKQLSHLHTHMLTHQGTRPHKCQVCHKAFTQTSHLKRHMMQHSEVKPHNCRVCGRGFAYPSELKAHEAKHASGRENICVECGLDFPTLAQLKRHLTTHRGPIQYNCSECDKTFQYPSQLQNHMMKHKDIRPYICSECGMEFVQPHHLKQHSLTHKGVKEHKCGICGREFTLLANMKRHVLIHTNIRAYQCHLCYKSFVQKQTLKAHMIVHSDVKPFKCKLCGKEFNRMHNLMGHMHLHSDSKPFKCLYCPSKFTLKGNLTRHMKVKHGVMERGLHSQGLGRGRIALAQTAGVLRSLEQEEPFDLSQKRRAKVPVFQSDGESAQGSHCHEEEEEDNCYEVEPYSPGLAPQSQQLCTPEDLSTKSEHAPEVLEEACKEEKEDASKGEWEKRSKGDLGAEGGQERDCAGRDECLSLRAFQSTRRGPSFSDYLYFKHRDESLKELLERKMEKQAVLLGI

SEQ ID NO: 16126 - protein, 350 aa, Homo Sapiens
MIRGFEAPMAENPPPPPPPVIFCHDSPKRVLVSVIRTTPIKPTCGGGGEPEPPPPLIPTSPGFSDFMVYPWRWGENAHNVTLSPGAAGAAASAALPAAAAAEHSGLRGRGAPPPAASASAAASGGEDEEEASSPDSGHLKDGIRRGRPRADTVRDLINEGEHSSSRIRCNICNRVFPREKSLQAHKRTHTGERPYLCDYPDCGKAFVQSGQLKTHQRLHTGEKPFVCSENGCLSRFTHANRHCPKHPYARLKREEPTDTLSKHQAADNKAAAEWLARYWEMREQRTPTLKGKLVQKADQEQQDPLEYLQSDEEDDEKRGAQRRLQEQRERLHGALALIELANLTGAPLRQ

SEQ ID NO: 16127 - protein, 561 aa, Homo Sapiens
MITSQGSVSFRDVTVGFTQEEWQHLDPAQRTLYRDVMLENYSHLVSVGYCIPKPEVILKLEKGEEPWILEEKFPSQSHLELINTSRNYSIMKFNEFNKGGKCFCDEKHEIIHSEEEPSEYNKNGNSFWLNEDLIWHQKIKNWEQSFEYNECGKAFPENSLFLVHKRGYTGQKTCKYTEHGKTCDMSFFITHQQTHPRENHYGNECGENIFEESILLEHQSVYPFSQKLNLTPIQRTHSINNIIEYNECGTFFSEKLVLHLQQRTHTGEKPYECHECGKTFTQKSAHTRHQRTHTGGKPYECHECGKTFYKNSDLIKHQRIHTGERPYGCHECGKSFSEKSTLTQHQRTHTGEKPYECHECGKTFSFKSVLTVHQKTHTGEKPYECYACGKAFLRKSDLIKHQRIHTGEKPYECNECGKSFSEKSTLTKHLRTHTGEKPYECIQCGKFFCYYSGFTEHLRRHTGEKPFGCNECGKTFRQKSALIVHQRTHIRQKPYGCNQCGKSFCVKSKLIAHHRTHTGEKPYECNVCGKSFYVKSKLTVHQRIHLGRNPINVVNEGNYSG

SEQ ID NO: 16128 - protein, 550 aa, Homo Sapiens
MPLQGSVSFKDVTVDFTQEEWQQLDPAQKALYRDVMLENYCHFVSVGFHMAKPDMIRKLEQGEELWTQRIFPSYSYLEEDGKTEDVLVKFKEYQDRHSRPLIFINHKKLIKERSNIYGKTFTLGKNRISKTILCEYKPDGKVLKNISELVIRNISPIKEKFGDSTGWEKSLLNTKHEKIHPAVNLHKQTERVLSGKQELIQHQKVQAPEQPFDHNECEKSFLMKGMLFTHTRAHRGERTFEYNKDGIAFIEKSSLSVHPSNLMEKKPSAYNKYGKFLCRKPVFIMPQRPQTEEKPFHCPYCGNNFRRKSYLIEHQRIHTGEKPYVCNQCGKAFRQKTALTLHEKTHIEGKPFICIDCGKSFRQKATLTRHHKTHTGEKAYECPQCGSAFRKKSYLIDHQRTHTGEKPYQCNECGKAFIQKTTLTVHQRTHTGEKPYICNECGKSFCQKTTLTLHQRIHTGEKPYICNECGKSFRQKAILTVHHRIHTGEKSNGCPQCGKAFSRKSNLIRHQKTHTGEKPYECKQCGKFFSCKSNLIVHQKTHKVETTGIQ

SEQ ID NO: 16129 - protein, 475 aa, Homo Sapiens
MAEGSVMFSDVSIDFSQEEWDCLDPVQRDLYRDVMLENYGNLVSMGLYTPKPQVISLLEQGKEPWMVGRELTRGLCSDLESMCETKLLSLKKEVYEIELCQREIMGLTKHGLEYSSFGDVLEYRSHLAKQLGYPNGHFSQEIFTPEYMPTFIQQTFLTLHQIINNEDRPYECKKCGKAFSQNSQFIQHQRIHIGEKSYECKECGKFFSCGSHVTRHLKIHTGEKPFECKECGKAFSCSSYLSQHQRIHTGKKPYECKECGKAFSYCSNLIDHQRIHTGEKPYECKVCGKAFTKSSQLFQHARIHTGEKPYECKECGKAFTQSSKLVQHQRIHTGEKPYECKECGKAFSSGSALTNHQRIHTGEKPYDCKECGKAFTQSSQLRQHQRIHAGEKPFECLECGKAFTQNSQLFQHQRIHTDEKPYECNECGKAFNKCSNLTRHLRIHTGEKPYNCKECGKAFSSGSDLIRHQGIHTNK

SEQ ID NO: 16130 - protein, 577 aa, Homo Sapiens
MEESHFNSNPYFWPSIPTVSGQIENTMFINKMKDQLLPEKGCGLAPPHYPTLLTVPASVSLPSGISMDTESKSDQLTPHSQASVTQNITVVPVPSTGLMTAGVSCSQRWRREGSQSRGPGLVITSPSGSLVTTASSAQTFPISAPMIVSALPPGSQALQVVPDLSKKVASTLTEEGGGGGGGGGSVAPKPPRGRKKKRMLESGLPEMNDPYVLSPEDDDDHQKDGKTYRCRMCSLTFYSKSEMQIHSKSHTETKPHKCPHCSKTFANSSYLAQHIRIHSGAKPYSCNFCEKSFRQLSHLQQHTRIHSKMHTETIKPHKCPHCSKTFANTSYLAQHLRIHSGAKPYNCSYCQKAFRQLSHLQQHTRIHTGDRPYKCAHPGCEKAFTQLSNLQSHRRQHNKDKPFKCHNCHRAYTDAASLEVHLSTHTVKHAKVYTCTICSRAYTSETYLMKHMRKHNPPDLQQQVQAAAAAAAVAQAQAQAQAQAQAQAQAQAQAQASQASQQQQQQQQQQQQQQQQPPPHFQSPGAAPQGGGGGDSNPNPPPQCSFDLTPYKTAEHHKDICLTVTTSTIQVEHLASS

SEQ ID NO: 16131 - protein, 386 aa, Homo Sapiens
MILGSLSRAGPLPLLRQPPIMQPPLDLKQILPFPLEPAPTLGLFSNYSTMDPVQKAVLSHTFGGPLLKTKRPVISCNICQIRFNSQSQAEAHYKGNRHARRVKGIEAAKTRGREPGVREPGDPAPPGSTPTNGDGVAPRPVSMENGLGPAPGSPEKQPGSPSPPSIPETGQGVTKGEGGTPAPASLPGGSKEEEEKAKRLLYCALCKVAVNSLSQLEAHNKGTKHKTILEARSGLGPIKAYPRLGPPTPGEPEAPAQDRTFHCEICNVKVNSEVQLKQHISSRRHRDGVAGKPNPLLSRHKKSRGAGELAGTLTFSKELPKSLAGGLLPSPLAVAAVMAAAAGSPLSLRPAPAAPLLQGPPITHPLLHPAPGPIRTAHGPILFSPY

SEQ ID NO: 16132 - protein, 471 aa, Homo Sapiens
MNMANFLRGFEEKGIKNDRPEDQLSKEKKKILFSFCEVCNIQLNSAAQAQVHSNGKSHRKRVKQLSDGQPPPPAQASPSSNSSTGSTCHTTTLPALVRTPTLMMQPSLDIKPFMSFPVDSSSAVGLFPNFNTMDPVQKAVINHTFGVSIPPKKKQVISCNVCQLRFNSDSQAEAHYKGSKHAKKVKALDATKNKPKMVPSKDSAKANPSCSITPITGNNSDKSEDKGKLKASSSSQPSSSESGSFLLKSGTTPLPPGAATSPSKSTNGAPGTVVESEEEKAKKLLYCSLCKVAVNSLSQLEAHNTGSKHKTMVEARNGAGPIKSYPRPGSRLKMQNGSKGSGLQNKTFHCEICDVHVNSEIQLKQHISSRRHKDRVAGKPLKPKYSPYNKLQRSPSILAAKLAFQKDMMKPLAPAFLSSPLAAAAAVSSALSLPPRPSASLFQAPAIPPALLRPGHGPIRATPASILFAPY

SEQ ID NO: 16133 - protein, 424 aa, Homo Sapiens
MGLAAGPASGAPSPLLASLPLPTRPLQPPLDFKHLLAFHFNGAAPLSLFPNFSTMDPVQKAVISHTFGVPSPLKKKLFISCNICHLRFNSANQAEAHYKGHKHARKLKAVEAAKSKQRPHTQAQDGAVVSPIPTLASGAPGEPQSKVPAAPPLGPPLQPPPTPDPTCREPAHSELLDAASSSSSSSCPPCSPEPGREAPGPEPAAAAVGSSMSGEGRSEKGHLYCPTCKVTVNSASQLQAHNTGAKHRWMMEGQRGAPRRSRGRPVSRGGAGHKAKRVTGGRGGRQGPSPAFHCALCQLQVNSETQLKQHMSSRRHKDRLAGKTPKPSSQHSKLQKHAALAVSILKSKLALQKQLTKTLAARFLPSPLPTAATAICALPGPLALRPAPTAATTLFPAPILGPALFRTPAGAVRPATGPIVLAPY

SEQ ID NO: 16134 - protein, 395 aa, Homo Sapiens
MRNIMYFGGTCQSPALPALVRPPAPPLQPSLDIKPFLPFPLDTAAAVNLFPNFNAMDPIQKAVINHTFGVPLPHRRKQIISCNICQLRFNSDSQAAAHYKGTKHAKKLKALEAMKNKQKSVTAKDSAKTTFTSITTNTINTSSDKTDGTAGTPAISTTTTVEIRKSSVMTTEITSKVEKSPTTATGNSSCPSTETEEEKAKRLLYCSLCKVAVNSASQLEAHNSGTKHKTMLEARNGSGTIKAFPRAGVKGKGPVNKGNTGLQNKTFHCEICDVHVNSETQLKQHISSRRHKDRAAGKPPKPKYSPYNKLQKTAHPLGVKLVFSKEPSKPLAPRILPNPLAAAAAAAAVAVSSPFSLRTAPAATLFQTSALPPALLRPAPGPIRTAHTPVLFAPY

SEQ ID NO: 16135 - protein, 358 aa, Homo Sapiens
MESLRGNTAQGPTNEEDYKNEGQLSRQTKCPAQKKSSFENTVVRKVSVTLKEIFTGEEGPESSEFSLSPNLDAQQKIPKGHGSPISRKNSKDNSDLIKHQRLFSQRKPCKCNECEKAFSYQSDLLVHSRIHGGEKPFECNKCGKSFSRSTHLIEHQRTHTGEKPYECNECGKAFSRSTHLSLHQRIHTGEKPYECSECGKAFSRSTNLSQHQRTHTQERPYKCNECGKAFGDRSTIIQHQRIHTGENPYECSKCGKAFSWISSLTEHQRTHTGENPYECSECGKVFSRSSSLTEHQRIHSGEKPHECRVCGKGFSRSSSLIIHQRTHTGEKPYKCNDCGKAFCQSSTLIRHQHLHTKE

SEQ ID NO: 16136 - protein, 561 aa, Homo Sapiens
MNSSLTAQRRGSDAELGPWVMAARSKDAAPSQRDGLLPVKVEEDSPGSWEPNYPAASPDPETSRLHFRQLRYQEVAGPEEALSRLRELCRRWLRPELLSKEQILELLVLEQFLTILPEELQAWVREHCPESGEEAVAVVRALQRALDGTSSQGMVTFEDTAVSLTWEEWERLDPARRDFCRESAQKDSGSTVPPSLESRVENKELIPMQQILEEAEPQGQLQEAFQGKRPLFSKCGSTHEDRVEKQSGDPLPLKLENSPEAEGLNSISDVNKNGSIEGEDSKNNELQNSARCSNLVLCQHIPKAERPTDSEEHGNKCKQSFHMVTWHVLKPHKSDSGDSFHHSSLFETQRQLHEERPYKCGNCGKSFKQRSDLFRHQRIHTGEKPYGCQECGKSFSQSAALTKHQRTHTGEKPYTCLKCGERFRQNSHLNRHQSTHSRDKHFKCEECGETCHISNLFRHQRLHKGERPYKCEECEKSFKQRSDLFKHHRIHTGEKPYGCSVCGKRFNQSATLIKHQRIHTGEKPYKCLECGERFRQSTHLIRHQRIHQNKVLSAGRGGSRL

SEQ ID NO: 16137 - protein, 513 aa, Homo Sapiens
MASVLSRRLGKRSLLGARVLGPSASEGPSAAPPSEPLLEGAAPQPFTTSDDTPCQEQPKEVLKAPSTSGLQQVAFQPGQKVYVWYGGQECTGLVEQHSWMEGQVTVWLLEQKLQVCCRVEEVWLAELQGPCPQAPPLEPGAQALAYRPVSRNIDVPKRKSDAVEMDEMMAAMVLTSLSCSPVVQSPPGTEANFSASRAACDPWKESGDISDSGSSTTSGHWSGSSGVSTPSPPHPQASPKYLGDAFGSPQTDHGFETDPDPFLLDEPAPRKRKNSVKVMYKCLWPNCGKVLRSIVGIKRHVKALHLGDTVDSDQFKREEDFYYTEVQLKEESAAAAAAAAAGTPVPGTPTSEPAPTPSMTGLPLSALPPPLHKAQSSGPEHPGPESSLPSGALSKSAPGSFWHIQADHAYQALPSFQIPVSPHIYTSVSWAAAPSAACSLSPVRSRSLSFSEPQQPAPAMKSHLIVTSPPRAQSGARKARGEAKKCRKVYGIEHRDQWCTACRWKKACQRFLD

SEQ ID NO: 16138 - protein, 335 aa, Homo Sapiens
MSAKLGKSSSLLTQTSEECNGILTEKMEEEEQTCDPDSSLHWSSSYSPETFRQQFRQFGYQDSPGPHEALSRLWELCHLWLRPEVHTKEQILELLVLEQFLAILPKELQAWVQKHHPENGEETVTMLEDVERELDGPKQIFFGRRKDMIAEKLAPSEITEELPSSQLMPVKKQLQGASWELQSLRPHDEDIKTTNVKSASRQKTSLGIELHCNVSNILHMNGSQSSTYRGTYEQDGRFEKRQGNPSWKKQQKCDECGKIFSQSSALILHQRIHSGKKPYACDECAKAFSRSAILIQHRRTHTGEKPYKCHDCGKAFSQSSNLFRHRKRHIRKKVP

SEQ ID NO: 16139 - protein, 534 aa, Homo Sapiens
MAVESGVISTLIPQDPPEQELILVKVEDNFSWDEKFKQNGSTQSCQELFRQQFRKFCYQETPGPREALSRLQELCYQWLMPELHTKEQILELLVLEQFLSILPEELQIWVQQHNPESGEEAVTLLEDLEREFDDPGQQVPASPQGPAVPWKDLTCLRASQESTDIHLQPLKTQLKSWKPCLSPKSDCENSETATKEGISEEKSQGLPQEPSFRGISEHESNLVWKQGSATGEKLRSPSQGGSFSQVIFTNKSLGKRDLYDEAERCLILTTDSIMCQKVPPEERPYRCDVCGHSFKQHSSLTQHQRIHTGEKPYKCNQCGKAFSLRSYLIIHQRIHSGEKAYECSECGKAFNQSSALIRHRKIHTGEKACKCNECGKAFSQSSYLIIHQRIHTGEKPYECNECGKTFSQSSKLIRHQRIHTGERPYECNECGKAFRQSSELITHQRIHSGEKPYECSECGKAFSLSSNLIRHQRIHSGEEPYQCNECGKTFKRSSALVQHQRIHSGDEAYICNECGKAFRHRSVLMRHQRVHTIK

SEQ ID NO: 16140 - protein, 642 aa, Homo Sapiens
MAEAAPAPTSEWDSECLTSLQPLPLPTPPAANEAHLQTAAISLWTVVAAVQAIERKVEIHSRRLLHLEGRTGTAEKKLASCEKTVTELGNQLEGKWAVLGTLLQEYGLLQRRLENLENLLRNRNFWILRLPPGIKGDIPKVPVAFDDVSIYFSTPEWEKLEEWQKELYKNIMKGNYESLISMDYAINQPDVLSQIQPEGEHNTEDQAGPEESEIPTDPSEEPGISTSDILSWIKQEEEPQVGAPPESKESDVYKSTYADEELVIKAEGLARSSLCPEVPVPFSSPPAAAKDAFSDVAFKSQQSTSMTPFGRPATDLPEASEGQVTFTQLGSYPLPPPVGEQVFSCHHCGKNLSQDMLLTHQCSHATEHPLPCAQCPKHFTPQADLSSTSQDHASETPPTCPHCARTFTHPSRLTYHLRVHNSTERPFPCPDCPKRFADQARLTSHRRAHASERPFRCAQCGRSFSLKISLLLHQRGHAQERPFSCPQCGIDFNGHSALIRHQMIHTGERPYPCTDCSKSFMRKEHLLNHRRLHTGERPFSCPHCGKSFIRKHHLMKHQRIHTGERPYPCSYCGRSFRYKQTLKDHLRSGHNGGCGGDSDPSGQPPNPPGPLITGLETSGLGVNTEGLETNQWYGEGSGGGVL

SEQ ID NO: 16141 - protein, 552 aa, Homo Sapiens
MARVPLTFSDVAIDFSQEEWEYLNSDQRDLYRDVMLENYTNLVSLDFNFTTESNKLSSEKRNYEVNAYHQETWKRNKTFNLMRFIFRTDPQYTIEFGRQQRPKVGCFSQMIFKKHKSLPLHKRNNTREKSYECKEYKKGFRKYLHLTEHLRDHTGVIPYECNECGKAFVVFQHFIRHRKIHTDLKPYECNGCEKAFRFYSQLIQHQIIHTGMKPYECKQCGKAFRRHSHLTEHQKIHVGLKPFECKECGETFRLYRHMCLHQKIHHGVKPYKCKECGKAFGHRSSLYQHKKIHSGEKPYKCEQCEKAFVRSYLLVEHQRSHTGEKPHECMECGKAFGKGSSLLKHKRIHSSEKLYDCKDCGKAFCRGSQLTQHQRIHTGEKPHECKECGKTFKLHSYLIQHQIIHTDLKPYECKQCGKAFSRVGDLKTHQSIHAGEKPYECKECGKTFRLNSQLIYHQTIHTGLKPYVCKECKKAFRSISGLSQHKRIHTGEKPYECKECDKAFNRSDRLTQHETIHTGVKPQKCKECGKAFSHCYQLSQHQRFHHGERLLM

SEQ ID NO: 16142 - protein, 2248 aa, Homo Sapiens
MMDSENKPENDEDEKINKEAQDLTKLSSHNEDGGPVSDVIASFPENSMGKRGFSESSNSDSVVIGEDRNKHASKRRKLDEAEPLKSGKQGICRLETSESSVTEGGIALDETGKETFLSDCTVGGTCLPNALSPSCNFSTIDVVSLKTDTEKTSAQEMVSLDLERESPFPPKEISVSCTIGNVDTVLKCSICGHLFSSCSDLEKHAESHMQQPKEHTCCHCSHKAESSSALHMHIKQAHGPQKVFSCDLCGFQCSEENLLNAHYLGKTHLRRQNLAARGGFVQILTKQPFPKKSRTMATKNVHSKPRTSKSIAKNSDSKGLRNVGSTFKDFRGSISKQSGSSSELLVEMMPSRNTLSQEVEIVEEHVTSLGLAQNPENQSRKLDTLVTSEGLLEKLESTKNTLQAAHGNSVTSRPRPERNILVLGNSFRRRSSTFTLKGQAKKRFNLLGIKRGTSETQRMYMKHLRTQMKTHDAESVLKHLEACSSVQRVCVTTSETQEAEQGQGSARPPDSGLHSLTVKPASGSQTLCACTDCGQVATNRTDLEIHVKRCHAREMKFYCRTCDFSSMSRRDLDEHLHSNQHQQTASVLSCQCCSFISLDEINLRDHMKEKHNMHFLCTPCNLFFLSEKDVEEHKATEKHINSLVQPKTLQSSNSDLVLQTLPLSTLESENAKESMDDSGKASQEEPLKSRVSHGNEVRHSSKPQFQCKKCFYKTRSSTVLTRHIKLRHGQDYHFLCKACNLYSLSKEGMEKHIKRSKHLENAKKNNIGLSFEECIERVCIGANDKKEEFDVSGNGRIEGHIGVQLQEHSYLEKGMLASEELSQSGGSTKDDELASTTTPKRGRPKGNISRTCSHCGLLASSITNLTVHIRRKHSHQYSYLCKVCKYYTVTKGDMERHCATKKHKGRVEIEASGKHSSDIIVGPEGGSLEAGKKNAGSAVTMSDEHANKPAESPTSVLEKPDRGNSIEAEVENVFHSLDGEVNSHLLDKKEQISSEPEDFAQPGDVYSQRDVTGTGENKCLHCEFSAHSSASLELHVKRKHTKEFEFYCMACDYYAVTRREMTRHAATEKHKMKRQSYLNSANVEAGSADMSKNIIMPEEEHQQNSEEFQIISGQPSDTLKSRNAADCSILNENTNLDMSKVLCAADSVEVETEEESNFNEDHSFCETFQQAPVKDKVRKPEEMMSLTMSSNYGSPSRFQNENSGSSALNCETAKKNHEISNDAGELRVHCEGEGGNAGDGGGVVPHRHLCPVTLDGERSAESPVLVVTRITREQGNLESGGQNRVARGHGLEDLKGVQEDPVLGNKEILMNSQHETEFILEEDGPASDSTVESSDVYETIISIDDKGQAMYSFGRFDSSIIRIKNPEDGELIDQSEEGLIATGVRISELPLKDCAQGVKKKKSEGSSIGESTRIRCDDCGFLADGLSGLNVHIAMKHPTKEKHFHCLLCGKSFYTESNLHQHLASAGHMRNEQASVEELPEGGATFKCVKCTEPFDSEQNLFLHIKGQHEELLREVNKYIVEDTEQINREREENQGNVCKYCGKMCRSSNSMAFLAHIRTHTGSKPFKCKICHFATAQLGDARNHVKRHLGMREYKCHVCGVAFVMKKHLNTHLLGKHGVGTPKERKFTCHLCDRSFTEKWALNNHMKLHTGEKPFKCTWPTCHYSFLTASAMKDHYRTHTGEKSFLCDLCGFAGGTRHALTKHRRQHTGEKPFKCDECNFASTTQSHLTRHKRVHTGEKPYRCPWCDYRSNCAENIRKHILHTGKHEGVKMYNCPKCDYGTNVPVEFRNHLKEQHPDIENPDLAYLHAGIVSKSYECRLKGQGATFVETDSPFTAAALAEEPLVKEKPLRSSRRPAPPPEQVQQVIIFQGYDGEFALDPSVEETAAATLQTLAMAGQVARVVHITEDGQVIATSQSGAHVGSVVPGPILPEQLADGATQVVVVGGSMEGHGMDESLSPGGAVIQQVTKQEILNLSEAGVAPPEASSALDALLCAVTELGEVEGRAGLEEQGRPGAKDVLIQLPGQEVSHVAADPEAPEIQMFPQAQESPAAVEVLTQVVHPSAAMASQERAQVAFKKMVQGVLQFAVCDTAAAGQLVKDGVTQVVVSEEGAVHMVAGEGAQIIMQEAQGEHMDLVESDGEISQIIVTEELVQAMVQESSGGFSEGTTHYILTELPPGVQDEPGLYSHTVLETADSQELLQAGATLGTEAGAPSRAEQLASVVIYTQEGSSAAAAIQSQRESSELQEA

SEQ ID NO: 16143 - protein, 720 aa, Homo Sapiens
MEEAEELLLEGKKALQLAREPRLGLDLGWNPSGEGCTQGLKDVPPEPTRDILALKSLPRGLALGPSLAKEQRLGVWCVGDPLQPGLLWGPLEEESASKEKGEGVKPRQEENLSLGPWGDVCACEQSSGWTSLVQRGRLESEGNVAPVRISERLHLQVYQLVLPGSELLLWPQPSSEGPSLTQPGLDKEAAVAVVTEVESAVQQEVASPGEDAAEPCIDPGSQSPSGIQAENMVSPGLKFPTQDRISKDSQPLGPLLQDGDVDEECPAQAQMPPELQSNSATQQDPDGSGASFSSSARGTQPHGYLAKKLHSPSDQCPPRAKTPEPGAQQSGFPTLSRSPPGPAGSSPKQGRRYRCGECGKAFLQLCHLKKHAFVHTGHKPFLCTECGKSYSSEESFKAHMLGHRGVRPFPCPQCDKAYGTQRDLKEHQVVHSGARPFACDQCGKAFARRPSLRLHRKTHQVPAAPAPCPCPVCGRPLANQGSLRNHMRLHTGEKPFLCPHCGRAFRQRGNLRGHLRLHTGERPYRCPHCADAFPQLPELRRHLISHTGEAHLCPVCGKALRDPHTLRAHERLHSGERPFPCPQCGRAYTLATKLRRHLKSHLEDKPYRCPTCGMGYTLPQSLRRHQLSHRPEAPCSPPSVPSAASEPTVVLLQAEPQLLDTHREEEVSPARDVVEVTISESQEKCFVVPEEPDAAPSLVLIHKDMGLGAWAEVVEVEMGT

SEQ ID NO: 16144 - protein, 821 aa, Homo Sapiens
MAANGDSPPWSPALAAEGRGSSCEVRRERTPEARIHSVKRYPDLSPGPKGRSSADHAALNSIVSLQASVSFEDVTVDFSKEEWQHLDPAQRRLYWDVTLENYSHLLSVGYQIPKSEAAFKLEQGEGPWMLEGEAPHQSCSGEAIGKMQQQGIPGGIFFHCERFDQPIGEDSLCSILEELWQDNDQLEQRQENQNNLLSHVKVLIKERGYEHKNIEKIIHVTTKLVPSIKRLHNCDTILKHTLNSHNHNRNSATKNLGKIFGNGNNFPHSPSSTKNENAKTGANSCEHDHYEKHLSHKQAPTHHQKIHPEEKLYVCTECVMGFTQKSHLFEHQRIHAGEKSRECDKSNKVFPQKPQVDVHPSVYTGEKPYLCTQCGKVFTLKSNLITHQKIHTGQKPYKCSECGKAFFQRSDLFRHLRIHTGEKPYECSECGKGFSQNSDLSIHQKTHTGEKHYECNECGKAFTRKSALRMHQRIHTGEKPYVCADCGKAFIQKSHFNTHQRIHTGEKPYECSDCGKSFTKKSQLHVHQRIHTGEKPYICTECGKVFTHRTNLTTHQKTHTGEKPYMCAECGKAFTDQSNLIKHQKTHTGEKPYKCNGCGKAFIWKSRLKIHQKSHIGERHYECKDCGKAFIQKSTLSVHQRIHTGEKPYVCPECGKAFIQKSHFIAHHRIHTGEKPYECSDCGKCFTKKSQLRVHQKIHTGEKPNICAECGKAFTDRSNLITHQKIHTREKPYECGDCGKTFTWKSRLNIHQKSHTGERHYECSKCGKAFIQKATLSMHQIIHTGKKPYACTECQKAFTDRSNLIKHQKMHSGEKRYKASD

SEQ ID NO: 16145 - protein, 478 aa, Homo Sapiens
MLSDELESKPELLVQFVQNTSIPLGQGLVESEAKDITCLSLLPVTEASECSRLMLPDDTTNHSNSSKEVPSSAVLRSLRVNVGPDGEETRAQTVQKSPEFLSTSESSSLLQDLQPSDSTSFILLNLTRAGLGSSAEHLVFVQDEAEDSGNDFLSSESTDSSIPWFLRVQELAHDSLIAATRAQLAKNAKTSSNGENVHLGSGDGQSKDSGPLPQVEKKLKCTVEGCDRTFVWPAHFKYHLKTHRNDRSFICPAEGCGKSFYVLQRLKVHMRTHNGEKPFMCHESGCGKQFTTAGNLKNHRRIHTGEKPFLCEAQGCGRSFAEYSSLRKHLVVHSGEKPHQCQVCGKTFSQSGSRNVHMRKHHLQLGAAGSQEQEQTAEPLMGSSLLEEASVPSKNLVSMNSQPSLGGESLNLPNTNSILGVDDEVLAEGSPRSLSSVPDVTHHLVTMQSGRQSYEVSVLTAVNPQELLNQGDLTERRT

SEQ ID NO: 16146 - protein, 312 aa, Homo Sapiens
MEEKPSGPIPDMLATAEPSSSETDKEVLSPAVPAAAPSSSMSEEPGPEQAATPPVWERGGAGGMQQGSSPAPDSCQPGPGPSPGLTSIVSGTSEDLRPPRRRPPPGKQIPCSSPGCCLSFPSVRDLAQHLRTHCPPTQSLEGKLFRCSALSCTETFPSMQELVAHSKLHYKPNRYFKCENCLLRFRTHRSLFKHLHVCAEHAQSPAPPPPPALDREPPAPERPPEVDPASAPGLPFPLLEPFTTPAPAPTGPFLPYLNPAPFGLSPPRLRPFLAAAPGPPASSAAVWKKSQGAGSSPRRPQGGSDAPSGACR

SEQ ID NO: 16147 - protein, 603 aa, Homo Sapiens
MPELYTEDFIQGCDVGELQEPGLPGVLSYVGAQERALDHRKPSTSSKKTKRVEIDQRCENRLECNGAISAHCNLRLPDSNDSPASASRVAGITDLSRNCVIKELAPQQEGNPGEVFHTVTLEQHEKHDIEEFCFREIKKKIHDFDCQWRDDERNCNKVTTAPKENLTCRRDQRDRRGIGNKSIKHQLGLSFLPHPHELQQFQAEGKIYECNHVEKSVNHGSSVSPPQIISSTIKTHVSNKYGTDFICSSLLTQEQKSCIREKPYRYIECDKALNHGSHMTVRQVSHSGEKGYKCDLCGKVFSQKSNLARHWRVHTGEKPYKCNECDRSFSRNSCLALHRRVHTGEKPYKCYECDKVFSRNSCLALHQKTHIGEKPYTCKECGKAFSVRSTLTNHQVIHSGKKPYKCNECGKVFSQTSSLATHQRIHTGEKPYKCNECGKVFSQTSSLARHWRIHTGEKPYKCNECGKVFSYNSHLASHRRVHTGEKPYKCNECGKAFSVHSNLTTHQVIHTGEKPYKCNQCGKGFSVHSSLTTHQVIHTGEKPYKCNECGKSFSVRPNLTRHQIIHTGKKPYKCSDCGKSFSVRPNLFRHQIIHTKEKPYKRN

SEQ ID NO: 16148 - protein, 594 aa, Homo Sapiens
MAAAVLRDSTSVPVTAEAKLMGFTQGCVTFEDVAIYFSQEEWGLLDEAQRLLYRDVMLENFALITALVCWHGMEDEETPEQSVSVEGVPQVRTPEASPSTQKIQSCDMCVPFLTDILHLTDLPGQELYLTGACAVFHQDQKHHSAEKPLESDMDKASFVQCCLFHESGMPFTSSEVGKDFLAPLGILQPQAIANYEKPNKISKCEEAFHVGISHYKWSQCRRESSHKHTFFHPRVCTGKRLYESSKCGKACCCECSLVQLQRVHPGERPYECSECGKSFSQTSHLNDHRRIHTGERPYVCGQCGKSFSQRATLIKHHRVHTGERPYECGECGKSFSQSSNLIEHCRIHTGERPYECDECGKAFGSKSTLVRHQRTHTGEKPYECGECGKLFRQSFSLVVHQRIHTTARPYECGQCGKSFSLKCGLIQHQLIHSGARPFECDECGKSFSQRTTLNKHHKVHTAERPYVCGECGKAFMFKSKLVRHQRTHTGERPFECSECGKFFRQSYTLVEHQKIHTGLRPYDCGQCGKSFIQKSSLIQHQVVHTGERPYECGKCGKSFTQHSGLILHRKSHTVERPRDSSKCGKPYSPRSNIV

SEQ ID NO: 16149 - protein, 575 aa, Homo Sapiens
MAAAAPRRPTQQGTVTFEDVAVNFSQEEWCLLSEAQRCLYRDVMLENLALISSLGCWCGSKDEEAPCKQRISVQRESQSRTPRAGVSPKKAHPCEMCGLILEDVFHFADHQETHHKQKLNRSGACGKNLDDTAYLHQHQKQHIGEKFYRKSVREASFVKKRKLRVSQEPFVFREFGKDVLPSSGLCQEAAAVEKTDSETMHGPPFQEGKTNYSCGKRTKAFSTKHSVIPHQKLFTRDGCYVCSDCGKSFSRYVSFSNHQRDHTAKGPYDCGECGKSYSRKSSLIQHQRVHTGKTAYPCEECGKSFSQKGSLISHQRVHTGERPYECREYGKSFGQKGNLIQHQQGHTGERAYHCGECGKSFRQKFCFINHQRVHTGERPYKCGECGKSFGQKGNLVQHQRGHTGERPYECKECGKSFRYRSHLTEHQRLHTGERPYNCRECGKLFNRKYHLLVHERVHTGERPYACEVCGKLFGNKNCVTIHQRIHTGERPYECNECGKSFLSSSALHVHKRVHSGQKPYKCSECGKSFAECSSLIKHRRIHTGERPYECTKCGKTFQRSSTLLHHQSSHRRKAL

SEQ ID NO: 16150 - protein, 676 aa, Homo Sapiens
MQGTVAFEDVAVNFSQEEWSLLSEVQRCLYHDVMLENWVLISSLGCWCGSEDEEAPSKKSISIQRVSQVSTPGAGVSPKKAHSCEMCGAILGDILHLADHQGTHHKQKLHRCEAWGNKLYDSSNRPHQNQYLGEKPYRSSVEEALFVKRCKFHVSEESSIFIQSGKDFLPSSGLLLQEATHTGEKSNSKPECESPFQWGDTHYSCGECMKHSSTKHVFVQQQRLPSREECYCWECGKSFSKYDSVSNHQRVHTGKRPYECGECGKSFSHKGSLVQHQRVHTGKRPYECGECGKSFSHKGSLVQHQRVHTGERPYECGECGKSFSQNGTLIKHQRVHTGERPYECEECGKCFTQKGNLIQHQRGHTSERPYECEECGKCFSQKGTLTEHHRVHTRERPYECGECGKSFSRKGHLRNHQRGHTGERPYECGECGKSFSRKGNLIQHQRSHTGERPYECRECRKLFRGKSHLIEHQRVHTGERPYECNECGKSFQDSSGFRVHQRVHTGEKPFECSECGKSFPQSCSLLRHRRVHTGERPYECGECGKSFHQSSSLLRHQKTHTAERPYECRECGKFFSSLLEHRRVHTGERPYECRECGKTFTRRSAHFKHQRLHTRGKPYECSECGKSFAETFSLTEHRRVHTGERPYECSECGKSFHRSSSLLRHQRVHTERSPYK

SEQ ID NO: 16151 - protein, 510 aa, Homo Sapiens; identical to SEQ ID NO: 14420

SEQ ID NO: 16152 - protein, 688 aa, Homo Sapiens
MARKLVMFRDVAIDFSQEEWECLDSAQRDLYRDVMLENYSNLVSLDLPSRCASKDLSPEKNTYETELSQWEMSDRLENCDLEESNSRDYLEAKGKMEKQQENQKEYFRQGMIIYDKMSIFNQHTYLSQHSRCHSTEKPYKCKECGKAFRRASHLTQHQSIHTGEKPYECKQCGKAFSRDSQLSLHQRLHTGEKPYACKECGKAFTQSSQLILHHRIHTGEKPYKCEECGKAFIRSSQLTRHQKVHTGEKPYECKECGKAFTQNSQLTLHQRLHTGEKLYECKECRKVFTQLSQLILHKRIHTGEKPYECKECGKAFICGSQLSQHQKIHNGEKPYECKECGRAFIRGSLLMQHQRIHTGEKPYKCEECGKAFIRGSQLTQHQRIHTNEKPYECKECGKMFSHGSQLTQHQRIHTGEKPYQCKECGKAFNRGSLLTRHQRIHTGEKPYECKECGKTFSRGSELTQHERIHTGEKPYECKECGKSFIRGSQLTQHQRIHTGEKPYECKECRMAFTQSSHLSQHQRLHTGEKPYVCNECGKAFARGLLLIQHQRIHTGEKPYQCKECGKAFIRGSQLTQHQRIHTGEKPYECKECGKAFSHGSQLTLHQRIHTGEKPYECRECRKAFTQSSHLSRHQRIHTGEKPYQCKECGKAFTRGSQLTQHQRIHISEKSFEYKECGIDFSHGSQVYM

SEQ ID NO: 16153 - protein, 1284 aa, Homo Sapiens
MHKKRVEEGEASDFSLAWDSSVTAAGGLEGEPECDQKTSRALEDRNSVTSQEERNEDDEDMEDESIYTCDHCQQDFESLADLTDHRAHRCPGDGDDDPQLSWVASSPSSKDVASPTQMIGDGCDLGLGEEEGGTGLPYPCQFCDKSFIRLSYLKRHEQIHSDKLPFKCTYCSRLFKHKRSRDRHIKLHTGDKKYHCHECEAAFSRSDHLKIHLKTHSSSKPFKCTVCKRGFSSTSSLQSHMQAHKKNKEHLAKSEKEAKKDDFMCDYCEDTFSQTEELEKHVLTRHPQLSEKADLQCIHCPEVFVDENTLLAHIHQAHANQKHKCPMCPEQFSSVEGVYCHLDSHRQPDSSNHSVSPDPVLGSVASMSSATPDSSASVERGSTPDSTLKPLRGQKKMRDDGQGWTKVVYSCPYCSKRDFNSLAVLEIHLKTIHADKPQQSHTCQICLDSMPTLYNLNEHVRKLHKNHAYPVMQFGNISAFHCNYCPEMFADINSLQEHIRVSHCGPNANPSDGNNAFFCNQCSMGFLTESSLTEHIQQAHCSVGSAKLESPVVQPTQSFMEVYSCPYCTNSPIFGSILKLTKHIKENHKNIPLAHSKKSKAEQSPVSSDVEVSSPKRQRLSASANSISNGEYPCNQCDLKFSNFESFQTHLKLHLELLLRKQACPQCKEDFDSQESLLQHLTVHYMTTSTHYVCESCDKQFSSVDDLQKHLLDMHTFVLYHCTLCQEVFDSKVSIQVHLAVKHSNEKKMYRCTACNWDFRKEADLQVHVKHSHLGNPAKAHKCIFCGETFSTEVELQCHITTHSKKYNCKFCSKAFHAIILLEKHLREKHCVFDAATENGTANGVPPMATKKAEPADLQGMLLKNPEAPNSHEASEDDVDASEPMYGCDICGAAYTMEVLLQNHRLRDHNIRPGEDDGSRKKAEFIKGSHKCNVCSRTFFSENGLREHLQTHRGPAKHYMCPICGERFPSLLTLTEHKVTHSKSLDTGTCRICKMPLQSEEEFIEHCQMHPDLRNSLTGFRCVVCMQTVTSTLELKIHGTFHMQKLAGSSAASSPNGQGLQKLYKCALCLKEFRSKQDLVKLDVNGLPYGLCAGCMARSANGQVGGLAPPEPADRPCAGLRCPECSVKFESAEDLESHMQVDHRDLTPETSGPRKGTQTSPVPRKKTYQCIKCQMTFENEREIQIHVANHMIEEGINHECKLCNQMFDSPAKLLCHLIEHSFEGMGGTFKCPVCFTVFVQANKLQQHIFAVHGQEDKIYDCSQCPQKFFFQTELQNHTMSQHAQ

SEQ ID NO: 16154 - protein, 752 aa, Homo Sapiens
MAEPASVTVTFDDVALYFSEQEWEILEKWQKQMYKQEMKTNYETLDSLGYAFSKPDLITWMEQGRMLLISEQGCLDKTRRTTSPPTDEQLNMKNTGKLLCFDDEGTPRTKEEDCRLNGPQKQDLCAALRGKERKILLAQTATFQSPSLRETEILNKKVSITAYDPDKKDLRHKPRETPGRLEIPTGPRCYSCYVCRKVFQVRRDLLKHKRSHSKSQLCRYPKYKNSSRGKSELRRTQRLLCQKKRFQCSECEKSYFLKGSLVTHQVVHTGQRPYPCPECDKTFRYRANLKKHLCLHRGERPFCCGECGRAFVQQCELTEHLRLHSGEKPFQCPQCDRCFRLKRGMKVHLTQHSGKRPFHCPECGRSFSRKAALKTHQRTHSEEKPFSCGECGRKFIYKIKLDEHIRVHTGEKPFSCPECNKSFRLKRSLKAHGLQHIGKRPFQCPECSRGFFWRNAMRAHQRLHSEQKPFPCAECGKRFTRPSKLACHTRVHDRQKEFPCGECKKTFSQQSRLTQHLKVHTTEKPFSCAECGRSFRRRAHLTEHTRLHSGEEPFQCPECDKSFSWKASMKFHQRMHRDEKPFACGECDKTYTHQSQLTEHLRLHSGEKPYQCPECEKTFRLKGNLKSHLLQHSGQKPFSCVMCGKSFTQQYRLTEHIRVHSGEKPFQCPECDKSYCIRGSLKVHLYKHSGERPFQCPECGKGFLQKRSLKAHLCLHSGERPFSCDECGRSFTYVGALKTHIAVHAKEKPSSL

SEQ ID NO: 16155 - protein, 554 aa, Homo Sapiens
MAAADLSHGHYLSGDPVCLHEEKTPAGRIVADCLTDCYQDSVTFDDVAVDFTQEEWTLLDSTQRSLYSDVMLENYKNLATVGGQIIKPSLISWLEQEESRTVQGGVLQGWEMRLETQWSILQQDFLRGQTSIGIQLEGKHNGRELCDCEQCGEVFSEHSCLKTHVRTQSTGNTHDCNQYGKDFLTLCEKTSTGEKLSEFNQSEKIFSLTPNIVYQRTSTQEKSFECSHCGKSFINESYLQAHMRTHNGEKLYEWRNYGPGFIDSTSLSVLIETLNAKKPYKCKECGKGYRYPAYLSIHMRTHTGEKPYECKECGKAFNYSNSFQIHGRTHTGEKPYVCKECGKAFTQYSGLSMHVRSHSGDKPYECKECGKSFLTSSRLIQHIRTHTGEKPFVCVECGKAFAVSSNLSGHLRTHTEEKACECKICGKVFGYPSCLNNHMRTHSAQKPYTCKECGKAFNYSTHLKIHMRIHTGEKPYECKQCGKAFSHSSSFQIHERTHTGEKPYECKECGKAFTCSSSFRIHEKTHTEEKPYKCQQCGKAYSHPRSLRRHEQIH

SEQ ID NO: 16156 - protein, 188 aa, Homo Sapiens
MTETREPAETGGYASLEEDDEDLSPGPEHSSDSEYTLSEPDSEEEEDEEEEEEETTDDPEYDPGYKVKQRLGGGRGGPSRRAPRAAQPPAQPCQLCGRSPLGEAPPGTPPCRLCCPATAPQEAPAPEGRALGEEEEEPPRAGEGRPAGREEEEEEEEEGTYHCTECEDSFDNLGELHGHFMLHARGEV

SEQ ID NO: 16157 - protein, 674 aa, Homo Sapiens
MGPLTFTDVAIEFSLEEWQCLDTAQQNLYRNVMLENYRNLVFLGIAVSKPDLITCLEKEKEPCKMKRHEMVDEPPVVCSHFAEDFWPEQDIKDSFQKVTLRRYDKRGHENLQLRKGYKTVGDCKLYKGGYNGLNQCLTLTQSKMYHCDIYVKVFYAFSNADRYKTRHTGKKPFQCKKCGKSFCMLSQLTQHKKIHIRENTYRCKEFGNAFNQSSALTNHKRIYVGEKHYRCEECGKAFNHYSTLTNHKRIHTGEKPYKCKECGKAFSRYSTLTTHKRIHSGEKPYKCDECGKTFSISSTFTKHKIIHTEEKPYKCKECGKAFNRSSTLTSHKRIHTGEKPYKCEECGKAFNWSSTLTKHKVIHTGEKPYKCEECGKAFNQSSRLTRHKKIHTGEEPYKFEKCGRVFTCSSTLTQDKKIHTGEKPYNCEECGKVFTYSSTLTRHKRIHTEEKPYKCNECGKAFNRSSHLTSHRRIHTGEKPYKCEECGKAFKQSSNLNSHKKIHSGEKPYKCEECGKAFILSSRLTQHKKIHTGEKPYKCEECGKAFNRSSRLTQHKKIHTGEKPYKCKQCDKAFTHSSNLSSHKKIHSGEKPYKCEECGKAFNRSSRLTQHKKIHTREKPYKCEECAKAFTRSSRLTQHKKIHRMGVVAHACNPSTLGGRGGRITRSGDRDRPG

SEQ ID NO: 16158 - protein, 809 aa, Homo Sapiens
MGPLTFMDVAIEFCLEEWQCLDIAQQNLYRNVMLENYRNLVFLGIAVSKPDLITCLEQEKEPWEPMRRHEMVAKPPVMCSHFTQDFWPEQHIKDPFQKATLRRYKNCEHKNVHLKKDHKSVDECKVHRGGYNGFNQCLPATQSKIFLFDKCVKAFHKFSNSNRHKISHTEKKLFKCKECGKSFCMLPHLAQHKIIHTRVNFCKCEKCGKAFNCPSIITKHKRINTGEKPYTCEECGKVFNWSSRLTTHKKNYTRYKLYKCEECGKAFNKSSILTTHKIIRTGEKFYKCKECAKAFNQSSNLTEHKKIHPGEKPYKCEECGKAFNWPSTLTKHKRIHTGEKPYTCEECGKAFNQFSNLTTHKRIHTAEKFYKCTECGEAFSRSSNLTKHKKIHTEKKPYKCEECGKAFKWSSKLTEHKLTHTGEKPYKCEECGKAFNWPSTLTKHNRIHTGEKPYKCEVCGKAFNQFSNLTTHKRIHTAEKPYKCEECGKAFSRSSNLTKHKKIHIEKKPYKCEECGKAFKWSSKLTEHKITHTGEKPYKCEECGKAFNHFSILTKHKRIHTGEKPYKCEECGKAFTQSSNLTTHKKIHTGEKFYKCEECGKAFTQSSNLTTHKKIHTGGKPYKCEECGKAFNQFSTLTKHKIIHTEEKPYKCEECGKAFKWSSTLTKHKIIHTGEKPYKCEECGKAFKLSSTLSTHKIIHTGEKPYKCEKCGKAFNRSSNLIEHKKIHTGEQPYKCEECGKAFNYSSHLNTHKRIHTKEQPYKCKECGKAFNQYSNLTTHNKIHTGEKLYKPEDVTVILTTPQTFSNIK

SEQ ID NO: 16159 - protein, 570 aa, Homo Sapiens
MENLKSGVYPLKEASGCPGADRNLLVYSFYEKGPLTFRDVAIEFSLEEWQCLDTAQQDLYRKVMLENYRNLVFLAGIAVSKPDLITCLEQGKEPWNMKRHAMVDQPPVTYSHFAQDLWPEQGIKDSFQEVILRRYGKCGHEDLQLRTGCKSVDECNLHKECYDELNQCLTTTQSEIFQYDKYVNVFYKFSNPNIQKIRHTGKKPFKCKKCDKSFCMLLHLTQHKRIHIRENSYQCEECGKVFNWFSTLTRHRRIHTGEKPYKCEQCGKAFKQSSTLTTHKIIHTGEKPYRCEECGKTFNRSSHLTTHKRIHTGEKPYRCEECGRAFNRSSHLTTHKIIHTGEKPYKCEECGKAFNQSSTLTTHKIIHAGEKPYKCEECGKAFYRFSYLTKHKIIHTGEKFYKCEECGKGFNWSSTLTKHKRIHTGEKPYKCEQCGKAFNESSNLTAHKIIHTGEKPYKCEECGKAFNRSPKLTAHKVIHSGEKPYKCEECGKAFNQFSNLTKHKITHIGDTSYKYLECDKAFSQSSTLTKHKVIHTGEKPYNCEEYGKAFNQSSNLIEQSNSYWRETLQM

SEQ ID NO: 16160 - protein, 576 aa, Homo Sapiens
MDDLKYGVYPLKEASGCPGAERNLLVYSYFEKETLTFRDVAIEFSLEEWECLNPAQQNLYMNVMLENYKNLVFLGVAVSKQDPVTCLEQEKEPWNMKRHEMVDEPPAMCSYFTKDLWPEQDIKDSFQQVILRRYGKCEHENLQLRKGSASVDEYKVHKEGYNELNQCLTTTQSKIFPCDKYVKVFHKFLNANRHKTRHTGKKPFKCKKCGKSFCMLLHLSQHKRIHIRENSYQCEECGKAFKWFSTLTRHKRIHTGEKPFKCEECGKAFKQSSTLTTHKIIHTGEKPYRCEECGKAFNRSSHLTTHKIIHTGEKPYKCEECGKAFNQSSTLSTHKFIHAGEKPYKCEECDKAFNRFSYLTKHKIIHTGEKSYKCEECGKGFNWSSTLTKHKRIHTGEKPYKCEVCGKAFNESSNLTTHKMIHTGEKPYKCEECGKAFNRSPQLTAHKIIHTGEKPYKCEECGKAFSQSSILTTHKRIHTGEKPYKCEECGKAFNRSSNLTKHKIIHTGEKSYKCEECGKAFNQSSTLTKHRKIHTRQKPYNCEECDNTFNQSSNLIKQNNSYWRETLQMSRMWESL

SEQ ID NO: 16161 - protein, 652 aa, Homo Sapiens
MINAQELLTLEDVTVEFTWEEWQLLGPFQKDLYRDVMLEIYSNLLSMGYQVSKPDALSKLERGEEPWTMEDERHSRICPENNEVDDHLQDHLENQRMLKSVEQYHEHNAFGNTASQTKSLCLFRENHDTFELYIKTLKSNLSLVNQNKSCEINNSTKFSGDGKSFLHGNYEELYSAAKFSVSTKANSTKSQVSKHQRTHEIEKNHVCSECGKAFVKKSQLTDHERVHTGEKPYGCTLCAKVFSRKSRLNEHQRIHKREKSFICSECGKVFTMKSRLIEHQRTHTGEKPYICNECGKGFPGKRNLIVHQRNHTGEKSYICSECGKGFTGKSMLIIHQRTHTGEKPYICSECGKGFTTKHYVIIHQRNHTGEKPYICNECGKGFTMKSRMIEHQRTHTGEKPYICSECGKGFPRKSNLIVHQRNHTVEKSYLCSECGKGFTVKSMLIIHQRTHTGEKPYTCSECGKGFPLKSRLIVHQRTHTGEKPYRCSECGKGFIVNSGLMLHQRTHTGEKPYICNECGKGFAFKSNLVVHQRTHTGEKPFMCSECGKGFTMKRYLIVHQQIHTEEKSCICSECGRGFAKETELALHKQVHTGEKPYGCNECGKGFTMKSRLIVHQRTHTGEKPFVCSECRKAFSSKRNLIVHQRTHNGNKP

SEQ ID NO: 16162 - protein, 673 aa, Homo Sapiens; identical to SEQ ID NO: 14432

SEQ ID NO: 16163 - protein, 470 aa, Homo Sapiens
MAATLLMAGSQAPVTFEDMAMYLTREEWRPLDAAQRDLYRDVMQENYGNVVSLDFEIRSENEVNPKQEISEDVQFGTTSERPAENAEENPESEEGFESGDRSERQWGDLTAEEWVSYPLQPVTDLLVHKEVHTGIRYHICSHCGKAFSQISDLNRHQKTHTGDRPYKCYECGKGFSRSSHLIQHQRTHTGERPYDCNECGKSFGRSSHLIQHQTIHTGEKPHKCNECGKSFCRLSHLIQHQRTHSGEKPYECEECGKSFSRSSHLAQHQRTHTGEKPYECNECGRGFSERSDLIKHYRVHTGERPYKCDECGKNFSQNSDLVRHRRAHTGEKPYHCNECGENFSRISHLVQHQRTHTGEKPYECNACGKSFSRSSHLITHQKIHTGEKPYECNECWRSFGERSDLIKHQRTHTGEKPYECVQCGKGFTQSSNLITHQRVHTGEKPYECTECEKSFSRSSALIKHKRVHTD

SEQ ID NO: 16164 - protein, 828 aa, Homo Sapiens
MQNSVSVPPKDEGESNIPSGTIQSRKGLQNKSQFRTIAPKIVPKVLTSRMLPCHSPSRSDQVNLGPSINSKLLGMSTQNYALMQVAGQEGTFSLVALPHVASAQPIQKPRMSLPENLKLPIPRYQPPRNSKASRKKPILIFPKSGCSKAPAQTQMCPQMSPSPPHHPELLYKPSPFEEVPSLEQAPASISTAALTNGSDHGDLRPPVTNTHGSLNPPATPASSTPEEPAKQDLTALSGKAHFVSKITSSKPSAVASEKFKEQVDLAKTMTNLSPTILGNAVQLISSVPKGKLPIPPYSRMKTMEVYKIKSDANIAGFSLPGPKADCDKIPSTTEGFNAATKVASRLPVPQVSQQSACESAFCPPTKLDLNHKTKLNSGAAKRKGRKRKVPDEILAFQGKRRKYIINKCRDGKERVKNDPQEFRDQKLGTLKKYRSIMPKPIMVIPTLASLASPTTLQSQMLGGLGQDVLLNNSLTPKYLGCKQDNSSSPKPSSVFRNGFSGIKKPWHRCHVCNHHFQFKQHLRDHMNTHTNRRPYSCRICRKSYVRPGSLSTHMKLHHGENRLKKLMCCEFCAKVFGHIRVYFGHLKEVHRVVISTEPAPSELQPGDIPKNRDMSVRGMEGSLERENKSNLEEDFLLNQADEVKLQIKCGRCQITAQSFAEIKFHLLDVHGEEIEGRLQEGTFPGSKGTQEELVQHASPDWKRHPERGKPEKVHSSSEESHACPRLKRQLHLHQNGVEMLMENEGPQSGTNKPRETCQGPECPGLHTFLLWSHSGFNCLLCAEMLGRKEDLLHHWKHQHNCEDPSKLWAILNTVSNQGVIELSSEAEK

SEQ ID NO: 16165 - protein, 499 aa, Homo Sapiens
MLSLSPILLYTCEMFQDPVAFKDVAVNFTQEEWALLDISQKNLYREVMLETFWNLTSIGKKWKDQNIEYEYQNPRRNFRSVTEEKVNEIKEDSHCGETFTPVPDDRLNFQKKKASPEVKSCDSFVCEVGLGNSSSNMNIRGDTGHKACECQEYGPKPWKSQQPKKAFRYHPSLRTQERDHTGKKPYACKECGKNIIYHSSIQRHMVVHSGDGPYKCKFCGKAFHCLSLYLIHERTHTGEKPYECKQCGKSFSYSATHRIHERTHIGEKPYECQECGKAFHSPRSCHRHERSHMGEKAYQCKECGKAFMCPRYVRRHERTHSRKKLYECKQCGKALSSLTSFQTHIRMHSGERPYECKTCGKGFYSAKSFQRHEKTHSGEKPYKCKQCGKAFTRSGSFRYHERTHTGEKPYECKQCGKAFRSAPNLQLHGRTHTGEKPYQCKECGKAFRSASQLRIHRRIHTGEKPYECKKCGKAFRYVQNFRFHERTQTHKNALWRKTL

SEQ ID NO: 16166 - protein, 663 aa, Homo Sapiens
MALCYGTFWGYPKMLEAANLMEGLVDIGPWVTLPRGQPEVLEWGLPKDQDSVAFEDVAVNFTHEEWALLGPSQKNLYRDVMRETIRNLNCIGMKWENQNIDDQHQNLRRNPRCDVVERFGKSKDGSQCGETLSQIRNSIVNKNTPARVDACGSSVNGEVIMGHSSLNCYIRVDTGHKHRECHEYAEKSYTHKQCGKGLSYRHSFQTCERPHTGKKPYDCKECGKTFSSPGNLRRHMVVKGGDGPYKCELCGKAFFWPSLLRMHERTHTGEKPYECKQCSKAFPVYSSYLRHEKIHTGEKPYECKQCSKAFPDYSSYLRHERTHTGEKPYKCKQCGKAFSVSGSLRVHERIHTGEKPYTCKQCGKAFCHLGSFQRHMIMHSGDGPHKCKICGKGFDFPGSARIHEGTHTLEKPYECKQCGKLLSHRSSFRRHMMAHTGDGPHKCTVCGKAFDSPSVFQRHERTHTGEKPYECKQCGKAFRTSSSLRKHETTHTGEQPYKCKCGKAFSDLFSFQSHETTHSEEEPYECKECGKAFSSFKYFCRHERTHSEEKSYECQICGKAFSRFSYLKTHERTHTAEKPYECKQCRKAFFWPSFLLRHERTHTGERPYECKHCGKAFSRSSFCREHERTHTGEKPYECKECGKAFSSLSSFNRHKRTHWKDIL

SEQ ID NO: 16167 - protein, 595 aa, Homo Sapiens
MDPVAFKDVAVNFTQEEWALLDISQRKLYREVMLETFRNLTSLGKRWKDQNIEYEHQNPRRNFRSLIEEKVNEIKDDSHCGETFTPVPDDRLNFQEKKASPEVKSCESFVCGEVGLGNSSFNMNIRGDIGHKAYEYQEYGPKPCKCQQPKKAFRYRPSFRTQERDHTGEKPNACKVCGKTFISHSSVRRHMVMHSGDGPYKCKFCGKAFHCLRLYLIHERIHTGEKPCECKQCGKSFSYSATHRIHKRTHTGEKPYEYQECGKAFHSPRSYRRHERIHMGEKAYQCKECGKAFTCPRYVRIHERTHSRKNLYECKQCGKALSSLTSFQTHVRLHSGERPYECKICGKDFCSVNSFQRHEKIHSGEKPYKCKQCGKAFPHSSSLRYHERTHTGEKPYECKQCGKAFRSASHLRVHGRTHTGEKPYECKECGKAFRYVNNLQSHERTQTHIRIHSGERRYKCKICGKGFYCPKSFQRHEKTHTGEKLYECKQRSVVPSVVPVPFDIMKGLTLERSPINASNVGKPSELCQSFECMVGLTLKRNPMSVSNDGKPSDLPHTFEYVVGHTMERSPMHVRNVGNPSDLPRTFEFMKGHKHT

SEQ ID NO: 16168 - protein, 693 aa, Homo Sapiens
MDSVAFEDVAINFTCEEWALLGPSQKSLYRDVMQETIRNLDCIGMIWQNHDIEEDQYKDLRRNLRCHMVERACEIKDNSQCGGPFTQTQDSIVNEKIPGVDPWESSECTDVLMGRSSLNCYVRVDSEHKPCEYQEYGEKPYTHTQCGTAFSYQPCFQIHERPQHGKKLYDCKECASFSSLENLQRHMAAHHGDGPRICKLCGNAFIWPSLFHMLRRTHTEEKPYEYEQCSTAFPAYSSTLRHERTHSGEKPYQCKQCGKAFSCSCYTQLYERTHTGEQSYECKQCGKAFYHLGSFQRHMIVHTGDGPHKCKICGKGFLSPSSVRRHKRTHTGEKPYECKYCGKAFSDCTGFRRHMITHTGDGPHKCKVCGKAFDSPSLCRRHETTHTGEKPYKCECGKAFSDFYYFRNHETTHTGEKPYKCKQCGKAFICCTYLQIHERIHTGERPYKCKQCGKAFRSSNYIRVHEKTHTGEKPYECKQCGKALSHLKSFQRHMIMHTGDGPHKCKICGKSFDSPSSFRRHERIHTGERPYKCKLCGKGFRSSSYIQLHERTHTGEKPYGCQQCGKALSDLSSFRRHMITHTGNGPHKCKICGKGFDYPSSVQRHERTHTGEKPYECKECGKAFSHSSYLRIHERVHTGEKPYKCKECGKPFHCPSAFHKHERTHSMEKPYKCKECGEAFHCISSFHKHEMTH

SEQ ID NO: 16169 - protein, 627 aa, Homo Sapiens
MIVFGGEDRSDLFLPDSQTNEERKQYDSVAFEDVAVNFTQEEWALLGPSQKSLYRDVMWETIRNLDCIGMKWEDTNIEDQHRNPRRSLRCHIIERFSESRQPDSTVNEKPPGVDPCKSSVCGEIMGCSFLNCYITFDAGHKPDECQEYGEKPHTHKQCGTAFNYHHSFQTQERPHTGKKRYDCKECGKTFSSSGNLRRHIIVQRGGGPYICKLCGKAFFWPSLFRMHERTHTGEKPYECKQCCKAFPIYSSYLRHERTHTGEKPYECKHCSKAFPDYSSYVRHERTHTGEKPYKCKRCGRAFSVSSSLRIHERTHTGEKPYECKQCGKAFHHLGSFQRHMIRHTGDGPHKCKICGKGFDCPSSLQSHERTHTGEKPYECKQCGKALSHHSSFRSHMIMHTGDGPHKCKVCGKAFIYPSVFQGHERTHTGEKPYECKECGKAFRISSSLRRHETTHTGEKPYKCKCGKAFIDFYSFQNHETTHTGEKPYECKECGKAFSCFTYLSQHRRTHMAEKPYECKTCKKAFSHFGNLKVHERIHTGEKPYECKECRKAFSWLTCLLRHERIHTGKKSYECQQCGKAFTRSRFLRGHEKTHTGEKMHECKECGKALSSLSSLHRHKRTHWRDTL

SEQ ID NO: 16170 - protein, 671 aa, Homo Sapiens
MASVALEDVAVNFTREEWALLGPCQKNLYKDVMQETIRNLDCVVMKWKDQNIEDQYRYPRKNLRCRMLERFVESKDGTQCGETSSQIQDSIVTKNTLPGVGPCESSMRGEKVMGHSSLNCYIRVGAGHKPHEYHECGEKPDTHKQRGKAFSYHNSFQTHERLHTGKKPYDCKECGKSFSSLGNLQRHMAVQRGDGPYKCKLCGKAFFWPSLLHMHERTHTGEKPYECKQCSKAFSFYSSYLRHERTHTGEKPYECKQCSKAFPFYSSYLRHERTHTGEKPYKCKQCSKAFPDSSSCLIHERTHTGEKPYTCKQCGKAFSVSGSLQRHETTHSAEKPYACQQCGKAFHHLGSFQRHMIRHTGNGPHKCKICGKGFDCPSSLQSHERTHTGEKPYECKQCGKALSHRSSFRSHMIMHTGDGPHKCKVCGKAFVYPSVFQRHERTHTAEKPYKCKQCGKAYRISSSLRRHETTHTGEKPYKCKLGKACIDFCSFQNHKTTHTGEKPYECKECGKAFSRFRYLSRHKRTHTGEKPYECKTCRKAFGHYDNLKVHERIHSGEKPYECKECGKAFSWLTCFLRHERIHMREKSYECPQCGKAFTHSRFLQGHEKTHTGENPYECKECGKAFASLSSLHRHKKTHWKKTHTGENPYECKECGKAFASLSSLHRHKKTH

SEQ ID NO: 16171 - protein, 327 aa, Homo Sapiens
MEVAVPVKQEAEGLALDSPWHRFRRFHLGDAPGPREALGLLRALCRDWLRPEVHTKEQMLELLVLEQFLSALPADTQAWVCSRQPQSGEEAVALLEELWGPAASPDGSSATRVPQDVTQGPGATGGKEDSGMIPLAGTAPGAEGPAPGDSQAVRPYKQEPSSPPLAPGLPAFLAAPGTTSCPECGKTSLKPAHLLRHRQSHSGEKPHACPECGKAFRRKEHLRRHRDTHPGSPGSPGPALRPLPAREKPHACCECGKTFYWREHLVRHRKTHSGARPFACWECGKGFGRREHVLRHQRIHGRAAASAQGAVAPGPDGGGPFPPWPLG

SEQ ID NO: 16172 - protein, 1031 aa, Homo Sapiens
MPPGRWHAAYPAQAQSSRERGRLQTVKKEEEDESYTPVQAARPQTLNRPGQELFRQLFRQLRYHESSGPLETLSRLRELCRWWLRPDVLSKAQILELLVLEQFLSILPGELRVWVQLHNPESGEEAVALLEELQRDLDGTSWRDPGPAQSPDVHWMGTGALRSAQIWSLASPLRSSSALGDHLEPPYEIEARDFLAGQSDTPAAQMPALFPREGCPGDQVTPTRSLTAQLQETMTFKDVEVTFSQDEWGWLDSAQRNLYRDVMLENYRNMASLVGPFTKPALISWLEAREPWGLNMQAAQPKGNPVAAPTGDDLQSKTNKFILNQEPLEEAETLAVSSGCPATSVSEGIGLRESFQQKSRQKDQCENPIQVRVKKEETNFSHRTGKDSEVSGSNSLDLKHVTYLRVSGRKESLKHGCGKHFRMSSHHYDYKKYGKGLRHMIGGFSLHQRIHSGLKGNKKDVCGKDFSLSSHHQRGQSLHTVGVSFKCSDCGRTFSHSSHLAYHQRLHTQEKAFKCRVCGKAFRWSSNCARHEKIHTGVKPYKCDLCEKAFRRLSAYRLHRETHAKKKFLELNQYRAALTYSSGFDHHLGDQSGEKLFDCSQCRKSFHCKSYVLEHQRIHTQEKPYKCTKCRKTFRWRSNFTRHMRLHEEEKFYKQDECREGFRQSPDCSQPQGAPAVEKTFLCQQCGKTFTRKKTLVDHQRIHTGEKPYQCSDCGKDFAYRSAFIVHKKKHAMKRKPEGGPSFSQDTVFQVPQSSHSKEEPYKCSQCGKAFRNHSFLLIHQRVHTGEKPYKCRECGKAFRWSSNLYRHQRIHSLQKQYDCHESEKTPNVEPKILTGEKRFWCQECGKTFTRKRTLLDHKGIHSGEKRYKCNLCGKSYDRNYRLVNHQRIHSTERPFKCQWCGKEFIGRHTLSSHQRKHTRAAQAERSPPARSSSQDTKLRLQKLKPSEEMPLEDCKEACSQSSRLTGLQDISIGKKCHKCSICGKTFNKSSQLISHKRFHTRERPFKCSKCGKTFRWSSNLARHMKNHIRD

SEQ ID NO: 16173 - protein, 450 aa, Homo Sapiens
MPSPLGPPCLPVMDPETTLEEPETARLRFRGFCYQEVAGPREALARLRELCCQWLQPEAHSKEQMLEMLVLEQFLGTLPPEIQAWVRGQRPGSPEEAAALVEGLQHDPGQLLGWITAHVLKQEVLPAAQKTEEPLGSPHPSGTVESPGEGPQDTRIEGSVQLSCSVKEEPNVDGQEVAPSSPPLAAQSPEGNHGHQEPASTSFHPPRIQEEWGLLDRSQKELYWDAMLEKYGTVVSLGLPPHQPEAQAQSELGMLLTGTGVCRSLRSGNESEGPPGCPEAQPPQGPGPAAWEGLSGAATPAPTVRPGTPPVPTQPTPAETRLEPAATPRKPYTCEQCGRGFDWKSVFVIHHRTHTSGPGVQSPGLATGESTEKPPQGEVAFPHHPRRSLTGPRSYPCEECGCSFSWKSQLVIHRKSHTGQRRHFCSDCGRAFDWKSQLVIHRKGHRPEVP

SEQ ID NO: 16174 - protein, 518 aa, Homo Sapiens; identical to SEQ ID NO: 14436

SEQ ID NO: 16175 - protein, 682 aa, Homo Sapiens
MTKSKEAVTFKDVAVVFSEEELQLLDLAQRKLYRDVMLENFRNVVSVGHQSTPDGLPQLEREEKLWMMKMATQRDNSSGAKNLKEMETLQEVGLRYLPHEELFCSQIWQQITRELIKYQDSVVNIQRTGCQLEKRDDLHYKDEGFSNQSSHLQVHRVHTGEKPYKGEHCVKSFSWSSHLQINQRAHAGEKPYKCEKCDNAFRRFSSLQAHQRVHSRAKSYTNDASYRSFSQRSHLPHHQRVPTGENPYKYEECGRNVGKSSHCQAPLIVHTGEKPYKCEECGVGFSQRSYLQVHLKVHTGKKPYKCEECGKSFSWRSRLQAHERIHTGEKPYKCNACGKSFSYSSHLNIHCRIHTGEKPYKCEECGKGFSVGSHLQAHQISHTGEKPYKCEECGKGFCRASNLLDHQRGHTGEKPYQCDACGKGFSRSSDFNIHFRVHTGEKPYKCEECGKGFSQASNLLAHQRGHTGEKPYKCGTCGKGFSRSSDLNVHCRIHTGEKPYKCERCGKAFSQFSSLQVHQRVHTGEKPYQCAECGKGFSVGSQLQAHQRCHTGEKPYQCEECGKGFCRASNFLAHRGVHTGEKPYRCDVCGKRFRQRSYLQAHQRVHTGERPYKCEECGKVFSWSSYLQAHQRVHTGEKPYKCEECGKGFSWSSSLIIHQRVHADDEGDKDFPSSEDSHRKTR

SEQ ID NO: 16176 - protein, 1061 aa, Homo Sapiens
MGDPGSEIIESVPPAGPEASESTTDENEDDIQFVSEGPLRPVLEYIDLVSSDDEEPSTSYTDENIKRKDHIDYQKDKVALTLARLARHVEVEKQQKEEKNRAFREKIDFQHAHGLQELEFIRGHSDTEAARLCVDQWLKMPGLKTGTINCGTKSSFRRGGHTWVSGKPILCPIMHCNKEFDNGHLLLGHLKRFDHSPCDPTITLHGPFFSSFACVVCYKKFVTQQQYRDHLFDKEATDDGHNNNLLPQIIQCFACPNCFLLFSRKEECSKHMSGKNHFHQSFKLGDNKGIAHPISFPSFAKKLLISLCKDVPFQVKCVACHKTLRSHMELTAHFRVHCRNAGPVAVAEKSITQVAEKFILRGYCPDCNQVFVDETSTQNHKQNSGHKVRVINSVEESVLLYCHSSEGNKDPSSDLHLLLDQSKFSSLKRTMSIKESSSLECIAIPKKKMNLKDKSHEGVACVQKEKSVVKTWFCECNQRFPSEDAVEKHVFSANTMGYKCVVCGKVCDDSGVIRLHMSRIHGGAHLNNFLFWCRTCKKELTRKDTIMAHVTEFHNGHRYFYEMDEVEGETLPSSSTTLDNLTANKPSSAITVIDHSPANSSPRGKWQCRICEDMFDSQEYVKQHCMSLASHKFHRYSCAHCRKPFHKIETLYRHCQDEHDNEIKIKYFCGLCDLIFNVEEAFLSHYEEHHSIDYVFVSEKTETSIKTEDDFPVIETSNQLTCGCRESYICKVNRKEDYSRCLQIMLDKGKLWFRCSLCSATAQNLTDMNTHIHQVHKEKSDEEEQQYVIKCGTCTKAFHDPESAQQHFHRKHCFLQKPSVAHFGSEKSNLYKFTASASHTERKLKQAINYSKSLDMEKGVENDLSYQNIEEEIVELPDLDYLRTMTHIVFVDFDNWSNFFGHLPGHLNQGTFIWGFQGGNTNWKPPLNCKIYNYLNRIGCFFLHPRCSKRKDAADFAICMHAGRLDEQLPKQIPFTILSGDQGFLELENQFKKTQRPAHILNPHHLEGDMMCALLNSISDTTKECDSDDNMGAKNTSIGEEFISTEDVELEEAIRRSLEEM

SEQ ID NO: 16177 - protein, 522 aa, Homo Sapiens
MAVSHLPTMVQESVTFKDVAILFTQEEWGQLSPAQRALYRDVMLENYSNLVSLGLLGPKPDTFSQLEKREVWMPEDTPGGFCLDWMTMPASKKSTVKAEIPEEELDQWTIKERFSSSSHWKCASLLEWQCGGQEISLQRVVLTHPNTPSQECDESGSTMSSSLHSDQSQGFQPSKNAFECSECGKVFSKSSTLNKHQKIHNEKNANQKIHIKEKRYECRECGKAFHQSTHLIHHQRIHTGEKPYECKECGKAFSVSSSLTYHQKIHTGEKPFECNLCGKAFIRNIHLAHHHRIHTGEKPFKCNICEKAFVCRAHLTKHQNIHSGEKPYKCNECGKAFNQSTSFLQHQRIHTGEKPFECNECGKAFRVNSSLTEHQRIHTGEKPYKCNECGKAFRDNSSFARHRKIHTGEKPYRCGLCEKAFRDQSALAQHQRIHTGEKPYTCNICEKAFSDHSALTQHKRIHTREKPYKCKICEKAFIRSTHLTQHQRIHTGEKPYKCNKCGKAFNQTANLIQHQRHHIGEK

SEQ ID NO: 16178 - protein, 562 aa, Homo Sapiens
MAAAWMAPAQESVTFEDVAVTFTQEEWGQLDVTQRALYVEVMLETCGLLVALGDSTKPETVEPIPSHLALPEEVSLQEQLAQGVPRYSYLGQAMDQDGPSEMQEYFLRPGTDPQSEKLHGKMSLEHEGLATADGICSMMIQNQVSPEDALYGFDSYGPVTDSLIHEGENSYKFEEMFNENCFLVQHEQILPRVKPYDCPECGKAFGKSKHLLQHHIIHTGEKPYKCLECGKDFNRRSHLTRHQRTHNGDKPFVCSECGRTFNRGSHLTRHQRVHSGEKPFVCNECGKAFTYRSNFVLHNKSHNEKKPFACSECGKGFYESTALIQHFIIHTGERPFKCLECGKAFNCRSHLKQHERIHTGEKPFVCSQCGKAFTHYSTYVLHERAHTGEKPFECKECGKAFSIRKDLIRHFNIHTGEKPYECLQCGKAFTRMSGLTRHQWIHTGEKPYVCIQCGKAFCRTTNLIRHFSIHTGEKPYECVECGKAFNRRSPLTRHQRIHTAEKSHEPIQSGNVSCESTDLIQHSIIHTESSPVSAVNMETPSIAAHSSSLDINGFIVEETLPL

SEQ ID NO: 16179 - protein, 563 aa, Homo Sapiens
MAHELVMFRDVAIDVSQEEWECLNPAQRNLYKEVMLENYSNLVSLGLSVSKPAVISSLEQGKEPWMVVREETGRWCPGTWKTWGFHNNFLDNNEATDINADLASRDEPQKLSPKRDIYETELSQWVNMEEFKSHSPERSIFSAIWEGNCHFEQHQGQEEGYFRQLMINHENMPIFSQHTLLTQEFYDREKISECKKCRKIFSYHLFFSHHKRTHSKELSECKECTEIVNTPCLFKQQTIQNGDKCNECKECWKAFVHCSQLKHLRIHNGEKRYECNECGKAFNYGSELTLHQRIHTGEKPYECKECGKAFRQRSQLTQHQRLHTGEKPYECKQCGKAFIRGFQLTEHLRLHTGEKPYECKECGKTFRHRSHLTIHQRIHTGEKPYECRECGKAFSYHSSFSHHQKIHSGKKPYECHECGKAFCDGLQLTLHQRIHTGEKPYECKECGKTFRQCSHLKRHQRIHTGEKPHECMICGKAFRLHSHLIQHQRIHTGEKPYECKECGKAFSYHSSFSHHQRIHSGKKPYQCGKAFNHRLQLNLHQTLHTGEKPVRFPLLPPHPSLAS

SEQ ID NO: 16180 - protein, 2506 aa, Homo Sapiens
MEVLQCDGCDFRAPSYEDLKAHIQDVHTAFLQPTDVAEDNVNELRCGSVNASNQTEVEFSSIKDEFAIAEDLSGQNATSLGTGGYYGHSPGYYGQHIAANPKPTNKFFQCKFCVRYFRSKNLLIEHTRKVHGAQAEGSSSGPPVPGSLNYNIMMHEGFGKVFSCQFCTYKSPRRARIIKHQKMYHKNNLKETTAPPPAPAPMPDPVVPPVSLQDPCKELPAEVVERSILESMVKPLTKSRGNFCCEWCSYQTPRRERWCDHMMKKHRSMVKILSSLRQQQEGTNLPDVPNKSAPSPTSNSTYLTMNAASREIPNTTVSNFRGSMGNSIMRPNSSASKFSPMSYPQMKPKSPHNSGLVNLTERSRYGMTDMTNSSADLETNSMLNDSSSDEELNEIDSENGLSAMDHQTSGLSAEQLMGSDGNKLLETKGIPFRRFMNRFQCPFCPFLTMHRRSISRHIENIHLSGKTAVYKCDECPFTCKSSLKLGAHKQCHTGTTSDWDAVNSQSESISSSLNEGVVSYESSSINGRKSGVMLDPLQQQQPPQPPPPPPPPPPSQPQPLQQPQPPQLQPPHQVPPQPQTQPPPTQQPQPPTQAAPLHPYKCTMCNYSTTTLKGLRVHQQHKHSFCDNLPKFEGQPSSLPLENETDSHPSSSNTVKKSQTSILGLSSKNNFVAKASRKLANDFPLDLSPVKKRTRIDEIASNLQSKINQTKQQEDAVINVEDDEEEEEDNEVEIEVELDREEEPTEPIIEVPTSFSAQQIWVRDTSEPQKEPNFRNITHDYNATNGAEIELTLSEDEEDYYGSSTNLKDHQVSNTALLNTQTPIYGTEHNSENTDFGDSGRLYYCKHCDFNNKSARSVSTHYQRMHPYIKFSFRYILDPNDHSAVYRCLECYIDYTNFEDLQQHYGEHHPEAMNVLNFDHSDLIYRCRFCSYTSPNVRSLMPHYQRMHPTVKINNAMIFSSYVVEQQEGLNTESQTLREILNSAPKNMATSTPVARGGGLPATFNKNTPKTFTPECENQKDPLVNTVVVYDCDVCSFASPNMHSVLVHYQKKHPEEKASYFRIQKTMRMVSVDRGSALSQLSFEVGAPMSPKMSNMGSPPPPQPPPPDLSTELYYCKHCSYSNRSVVGVLVHYQKRHPEIKVTAKYIRQAPPTAAMMRGVEGPQGSPRPPAPIQQLNRSSSERDGPPVENEMFFCQHCDYGNRTVKGVLIHYQKKHRDFKANADVIRQHTATIRSLCDRNQKKPASCVLVSPSNLERDKTKLRALKCRQCSYTSPYFYALRKHIKKDHPALKATVTSIMRWAFLDGLIEAGYHCEWCIYSHTEPNGLLLHYQRRHPEHYVDYTYMATKLWAGPDPSPPSLTMPAEAKTYRCRDCVFEAVSIWDITNHYQAFHPWAMNGDESVLLDIIKEKDAVEKPILSSEELAGPVNCENSIPTPFPEQEAECPEDARLSPEKSLQLASANPAISSTPYQCTVCQSEYNNLHGLLTHYGKKHPGMKVKAADFAQDIDINPGAVYKCRHCPYINTRIHGVLTHYQKRHPSIKVTAEDFVHDVEQSADISQNDVEETSRIFKQGYGAYRCKLCPYTHGTLEKLKIHYEKYHNQPEFDVFSQSPPKLPVPLEPEMTTEVSPSQVSITEEEVGEEPVSTSHFSTSHLVSHTVFRCQLCKYFCSTRKGIARHYRIKHNNVRAQPEGKNNLFKCALCAYTNPIRKGLAAHYQKRHDIDAYYTHCLAASRTISDKPNKVIIPSPPKDDSPQLSEELRRAVEKKKCSLCSFQSFSKKGIVSHYMKRHPGVFPKKQHASKLGGYFTAVYADEHEKPTLMEEEERGNFEKAEVEGEAQEIEWLPFRCIKCFKLSFSTAELLCMHYTDHHSRDLKRDFIILGNGPRLQNSTYQCKHCDSKLQSTAELTSHLNIHNEEFQKRAKRQERRKQLLSKQKYADGAFADFKQERPFGHLEEVPKIKERKVVGYKCKFCVEVHPTLRAICNHLRKHVQYGNVPAVSAAVKGLRSHERSHLALAMFTREDKYSCQYCSFVSAFRHNLDRHMQTHHGHHKPFRCKLCSFKSSYNSRLKTHILKAHAGEHAYKCSWCSFSTMTISQLKEHSLKVHGKALTLPRPRIVSLLSSHSHHSSQKATPAEEVEDSNDSSYSEPPDVQQQLNHYQSAALARNNSRVSPVPLSGAAAGTEQKTEAVLHCEFCEFSSGYIQSIRRHYRDKHGGKKLFKCKDCSFYTGFKSAFTMHVEAGHSAVPEEGPKDLRCPLCLYHTKYKRNMIDHIVLHREERVVPIEVCRSKLSKYLQGVVFRCDKCTFTCSSDESLQQHIEKHNELKPYKCQLCYYETKHTEELDSHLRDEHKVSRNFELVGRVNLDQLEQMKEKMESSSSDDEDKEEEMNSKAEDRELMRFSDHGAALNTEKRFPCEFCGRAFSQGSEWERHVLRHGMALNDTKQVSREEIHPKEIMENSVKMPSIEEKEDDEAIGIDFSLKNETVAICVVTADKSLLENAEAKKE

SEQ ID NO: 16181 - protein, 595 aa, Homo Sapiens
MRETLEALSSLGFSVGQPEMAPQSEPREGSHNAQEQMSSSREERALGVCSGHEAPTPEEGAHTEQAEAPCRGQACSAQKAQPVGTCPGEEWMIRKVKVEDEDQEAEEEVEWPQHLSLLPSPFPAPDLGHLAAAYKLEPGAPGALSGLALSGWGPMPEKPYGCGECERRFRDQLTLRLHQRLHRGEGPCACPDCGRSFTQRAHMLLHQRSHRGERPFPCSECDKRFSKKAHLTRHLRTHTGERPYPCAECGKRFSQKIHLGSHQKTHTGERPFPCTECEKRFRKKTHLIRHQRIHTGERPYQCAQCARSFTHKQHLVRHQRVHQTAGPARPSPDSSASPHSTAPSPTPSFPGPKPFACSDCGLSFGWKKNLATHQCLHRSEGRPFGCDECALGATVDAPAAKPLASAPGGPGCGPGSDPVVPQRAPSGERSFFCPDCGRGFSHGQHLARHPRVHTGERPFACTQCDRRFGSRPNLVAHSRAHSGARPFACAQCGRRFSRKSHLGRHQAVHTGSRPHACAVCARSFSSKTNLVRHQAIHTGSRPFSCPQCGKSFSRKTHLVRHQLIHGEAAHAAPDAALAAPAWSAPPEVAPPPLFF

SEQ ID NO: 16182 - protein, 522 aa, Homo Sapiens
MALPQGLLTFRDVAIEFSQEEWKCLDPAQRTLYRDVMLENYRNLVSLDISSKCMLKTLSSTGQGNTEVIHTGTLHRQASHHIGEFCFHEIEKDIHGFEFQWKEDETNGHAAPMTEIKELAGSTGQHDQRHAGNKRIKDQLGSSFHLHLPEPHIFQSEGKIGNQVEKSINNASSVSTSQRICCRPKTHISNKYGNNSLHSSLLTQKWEVHMREKSFECIQSFKSFNCSSLLKKHQIIHLEEKQCKCDVCGKVFNQKRYLACHRRCHTGEKPYKCNECGKTFGHNSSLFIHKALHTGEKPYECEECDKVFSRKSHLERHKRIHTGEKPYKCKVCDEAFAYNSYLAKHTILHTGEKPYTCNECGKVFNRLSTLARHHRLHTGEKPYKCEECDKVFSRKSHLERHRRIHSGEKPYKCEECCKVFSRKSNLERHRRIHTGEKPYKCKVCDKAFQRDSHLAQHQRVHTGEKPYKCNECGKTFGQTSSLIIHRRLHTGEKPYKCNECGKTFSQMSSLVYHHRLHSGEKP

SEQ ID NO: 16183 - protein, 3925 aa, Homo Sapiens
MPGERPRGAPPPTMTGDLQPRQVASSPGHPSQPPLEDNTPATRTTKGAREAGGQAQAMELPEAQPRQARDGELKPPSLRGQAPSSTPGKRGSPQTPPGRSPLQAPSRLAGRAEGSPPQRYILGIASSRTKPTLDETPENPQLEAAQLPEVDTPQGPGTGAPLRPGLPRTEAQPAAEELGFHRCFQEPPSSFTSTNYTSPSATPRPPAPGPPQSRGTSPLQPGSYPEYQASGADSWPPAAENSFPGANFGVPPAEPEPIPKGSRPGGSPRGVSFQFPFPALHGASTKPFPADVAGHAFTNGPLVFAFHQPQGAWPEEAVGTGPAYPLPTQPAPSPLPCYQGQPGGLNRHSDLSGALSSPGAAHSAPRPFSDSLHKSLTKILPERPPSAQDGLGSTRGPPSSLPQRHFPGQAYRASGVDTSPGPPDTELAAPGPPPARLPQLWDPTAAPYPTPPGGPLAATRSMFFNGQPSPGQRLCLPQSAPLPWPQVLPTARPSPHGMEMLSRLPFPAGGPEWQGGSQGALGTAGKTPGPREKLPAVRSSQGGSPALFTYNGMTDPGAQPLFFGVAQPQVSPHGTPSLPPPRVVGASPSESPLPSPATNTAGSTCSSLSPMSSSPANPSSEESQLPGPLGPSAFFHPPTHPQETGSPFPSPEPPHSLPTHYQPEPAKAFPFPADGLGAEGAFQCLEETPFPHEGPEVGRGGLQGFPRAPPPYPTHHFSLSSASLDQLDVLLTCRQCDRNYSSLAAFLAHRQFCGLLLARAKDGHQRSPGPPGLPSPPAAPRVPADAHAGLLSHAKTFLLAGDAQAEGKDDPLRTGFLPSLAATPFPLPASDLDMEDDAKLDSLITEALNGMEYQSDNPEIDSSFIDVFADEEPSGPRGPSSGHPLKSKAGVTPESKAPPPLPAATPDPQTPRPGDRGCPARGRPKTRSLGLAPTEADAPSQGRQQRRGKQLKLFRKDLDSGGAAEGSGSGGGGRASGLRPRRNDGLGERPPPRPRRPRTQAPGSRADPAPRVPRAAALPEETRSSRRRRLPPRKDPRKRKARGGAWGKELILKIVQQKNRLREYDFASESEEDEQPPPRGPGFRGRRGRGEKRKEVELTQGPREDEPQKPRKAARQEAGGDGAPANPEEPGGSRPGPGRSPQARGPSRSLETGAAAREGGPKCADRPSVAPKDPLQVPTNTETSEETRPSLDFPQEAKEPETAEESAPDSTEFTEALRSPPAACAGEMGASPGLLIPEQPPPSRHDTGTPKPSGSLANTAPHGSSPTPGVGSLLGGPGGTQAPVSHNSKDPPARQPGEFLAPVANPSSTACPKPSVLSSKISSFGCDPAGFNRDPLGVPVAKKGPQPYSSPHSELFLGPKDLAGCFLEELHPKPSARDAPPASSSCLCQDGEDAGSLEPQLPRSPPGTAETEPGRAASPPTLESSSLFPDLPVDRFDPPLYGSLSANRDSGLPFACADPPQKTVPSDPPYPSFLLLEEVSPMLPSHFPDLSGGKVLSKTCPPERTVVPGAAPSLPGKGSGCSVALMSHLSEDELEIQKLVTELESQLQRSKDTRGAPRELAEAESVGRVELGTGTEPPSQRRTCQATVPHEDTFSAADLTRVGESTAHREGAESAVATVEAVQGRPGGTWPCPASFHPGHAALLPCAQEDLVSGAPFSPRGANFHFQPVQKAGASKTGLCQAEGDSRPPQDVCLPEPSKQPGPQLDAGSLAKCSPDQELSFPKNKEAASSQESEDSLRLLPCEQRGGFLPEPGTADQPHRGAPAPEAFGSPAVHLAPDLAFQGDGAPPLDATWPFGASPSHAAQGHSAGRAGGHLHPTAGRPGFEGNEFAPAGASSLTAPRGREAWLVPVPSPACVSNTHPSRRSQDPALSPPIRQLQLPGPGVAKSKDGILGLQELTPAAQSPPRVNPSGLEGGTVEGGKVACGPAQGSPGGVQVTTLPAVAGHQLGLEADGHWGLLGQAEKTQGQGTANQLQPENGVSPGGTDNHASVNASPKTALTGPTEGAVLLEKCKGSRAAMSLQEEAEPTPSPPSPNRESLALALTAAHSRSGSEGRTPERASSPGLNKPLLATGDSPAPSVGDLAACAPSPTSAAHMPCSLGPLPREDPLTSPSRAQGGLGGQLPASPSCRDPPGPQQLLACSPAWAPLEEADGVQATTDTGAEDSPVAPPSLTTSPCDPKEALAGCLLQGEGSPLEDPSSWPPGSVSAVTCTHSGDTPKDSTLRIPEDSRKEKLWESPGRATSPPLAGAVSPSVAVRATGLSSTPTGDEAQAGRGLPGPDPQSRGAPPHTNPDRMPRGHSSYSPSNTARLGHREGQAVTAVPTEPPTLQGAGPDSPACLEGEMGTSSKEPEDPGTPETGRSGATKMPRVTCPSTGLGLGRTTAPSSTASDFQSDSPQSHRNASHQTPQGDPLGPQDLKQRSRGYKKKPASTENGQWKGQAPHGPVTCEVCAASFRSGPGLSRHKARKHRPHPGAPAEPSPAALPAQQPLEPLAQKCQPPRKKSHRVSGKERPNHSRGDPSHVTQPPPAQGSKEVLRAPGSPHSQQLHPPSPTEHEVDVKTPASKPRPDQAREDELHPKQAEKREGRRWRREPTVDSPSHSEGKSNKKRGKLRGRRLREESILPVSADVISDGRGSRPSPAMASYAASPSHCLSVEGGPEADGEQPPRLATLGPGVMEGAAETDQEALCAGETGAQKPPGDRMLCPGRMDGAALGEQPTGQKGASARGFWGPRETKALGVCKESGSEPAEDSSRAHSRSEEGVWEENTPPLGPLGFPETSSSPADSTTSSCLQGLPDNPDTQGGVQGPEGPTPDASGSSAKDPPSLFDDEVSFSQLFPPGGRLTRKRNPHVYGKRCEKPVLPLPTQPSFEEGGDPTLGPARLPTDLSDSSSLCLCHEDPWEDEDPAGLPESFLLDGFLNSRVPGIDPWAPGLSLWALEPSREAGAEKLPSHCPEDDRPEAIPELHMVPAAWRGLEMPAPADDSSSSLGDVSPEPPSLERERCDGGLPGNTHLLPLRATDFEVLSTKFEMQDLCFLGPFEDPVGLPGPSFLDFEGTASSQGPQSRRTEEAAGAGRAQGRGRPAKGRRASYKCKVCFQRFRSLGELDLHKLAHTPAPPPTCYMCVERRFGSRELLRGHLQERHAQSKAGPWACGMCLKEVADVWMYNEHLREHAVRFARRGQARRSLGDLPGGLEGSSAVAHLLNSITEPAPKHHRGKRSAGKAAGSPGDPWGQEGEAKKDSPGERAKPRARSTPSNPDGAATPDSASATALADAGSPGPPRTTPSPSPDPWAGGEPLLQATPVHEACKDPSRDCHHCGKRFPKPFKLQRHLAVHSPQRVYLCPRCPRVYPEHGELLAHLGGAHGLLERPELQHTPLYACELCATVMRIIKKSFACSSCNYTFAKKEQFDRHMNKHLRGGRQPFAFRGVRRPGAPGQKARALEGTLPSKRRRVAMPGSAPGPGEDRPPPRGSSPILSEGSLPALLHLCSEVAPSTTKGWPETLERPVDPVTHPIRGCELPSNHQECPPPSLSPFPAALADGRGDCALDGALERPENEASPGSPGPLLQQALPLGASLPRPGARGQDAEGKRAPLVFSGKRRAPGARGRCAPDHFQEDHLLQKEKEVSSSHMVSEGGPRGTFHKGSATKPAGCQSSSKDRSAASTPSKALKFPVHPRKAVGSLAPGELARGTENGMKPATPKAKPGPSSQGSGSPRPGTKTGGGSQPQPASGQLQSETATTPAKPSFPSRSPAPERLPARAQAKSCTKGPREAGEQGPHGSLGPKEKGESSTKRKKGQVPGPARSESVGSFGRAPSAPDKPPRTPRKQATPSRVLPTKPKPNSQNKPRPPPSEQRKAEPGHTQRKDRLGKAFPQGRPLLRPPKRGTAVHGAEPAEPHTHRTAEAQSDLLSQLFGQRLTGFKIPLKKDASE

SEQ ID NO: 16184 - protein, 717 aa, Homo Sapiens
MKSQEEVEVAGIKLCKAMSLGSVTFTDVAIDFSQDEWEWLNLAQRSLYKKVMLENYRNLVSVGLCISKPDVISLLEQEKDPWVIKGGMNRGLCPDLECVWVTKSLSLNQDIYEEKLPPAIIMERLKSYDLECSTLGKNWKCEDLFERELVNQKTHFRQETITHIDTLIEKRDHSNKSGTVFHLNTLSYIKQIFPMEERIFNFHTDKKSLKTHSVVKKHKQDRGEKKLLKCNDCEKIFSKISTLTLHQRIHTGEKPYECIECGKAFSQSAHLAQHQRIHTGEKPFECTECGKAFSQNAHLVQHQRVHTGEKPYQCKQCNKAFSQLAHLAQHQRVHTGEKPYECIECGKAFSDCSSLAHHRRIHTGKRPYECIDCGKAFRQNASLIRHRRYYHTGEKPFDCIDCGKAFTDHIGLIQHKRTHTGERPYKCNVCGKAFSHGSSLTVHQRIHTGEKPYECNICEKAFSHRGSLTLHQRVHTGEKPYECKECGKAFRQSTHLAHHQRIHTGEKPYECKECSKTFSQNAHLAQHQKIHTGEKPYECKECGKAFSQIAHLVQHQRVHTGEKPYECIECGKAFSDGSYLVQHQRLHSGKRPYECLECGKAFRQRASLICHQRCHTGEKPYECNVCGKAFSHRKSLTLHQRIHTGEKPYECKECSKAFSQVAHLTLHKRIHTGERPYECKECGKAFRQSVHLAHHQRIHTGESSVILSSALPYHQVL

SEQ ID NO: 16185 - protein, 626 aa, Homo Sapiens
MNVEVVKVMPQDLVTFKDVAIDFSQEEWQWMNPAQKRLYRSMMLENYQSLVSLGLCISKPYVISLLEQGREPWEMTSEMTRSPFSDWESIYVTQELPLKQFMYDDACMEGITSYGLECSTFEENWKWEDLFEKQMGSHEMFSKKEIITHKETITKETEFKYTKFGKCIHLENIEESIYNHTSDKKSFSKNSMVIKHKKVYVGKKLFKCNECDKTFTHSSSLTVHFRIHTGEKPYACEECGKAFKQRQHLAQHHRTHTGEKLFECKECRKAFKQSEHLIQHQRIHTGEKPYKCKECRKAFRQPAHLAQHQRIHTGEKPYECKECGKAFSDGSSFARHQRCHTGKRPYECIECGKAFRYNTSFIRHWRSYHTGEKPFNCIDCGKAFSVHIGLILHRRIHTGEKPYKCGVCGKTFSSGSSRTVHQRIHTGEKPYECDICGKDFSHHASLTQHQRVHSGEKPYECKECGKAFRQNVHLVSHLRIHTGEKPYECKECGKAFRISSQLATHQRIHTGEKPYECIECGNAFKQRSHLAQHQKTHTGEKPYECNECGKAFSQTSNLTQHQRIHTGEKPYKCTECGKAFSDSSSCAQHQRLHTGQRPYQCFECGKAFRRKLSLICHQRSHTGEEP

SEQ ID NO: 16186 - protein, 871 aa, Homo Sapiens
MAEEFVTLKDVGMDFTLGDWEQLGLEQGDTFWDTALDNCQDLFLLDPPRPNLTSHPDGSEDLEPLAGGSPEATSPDVTETKNSPLMEDFFEEGFSQEIIEMLSKDGFWNSNFGEACIEDTWLDSLLGDPESLLRSDIATNGESPTECKSHELKRGLSPVSTVSTGEDSMVHNVSEKTLTPAKSKEYRGEFFSYSDHSQQDSVQEGEKPYQCSECGKSFSGSYRLTQHWITHTREKPTVHQECEQGFDRNASLSVYPKTHTGYKFYVCNEYGTTFSQSTYLWHQKTHTGEKPCKSQDSDHPPSHDTQPGEHQKTHTDSKSYNCNECGKAFTRIFHLTRHQKIHTRKRYECSKCQATFNLRKHLIQHQKTHAAKTTSECQECGKIFRHSSLLIEHQALHAGEEPYKCNERGKSFRHNSTLKIHQRVHSGEKPYKCSECGKAFHRHTHLNEHRRIHTGYRPHKCQECVRSFSRPSHLMRHQAIHTAEKPYSCAECKETFSDNNRLVQHQKMHTVKTPYECQECGERFICGSTLKCHESVHAREKQGFFVSGKILDQNPEQKEKCFKCNKCEKTFSCSKYLTQHERIHTRGVKPFECDQCGKAFGQSTRLIHHQRIHSRVRLYKWGEQGKAISSASLIKLQSFHTKEHPFKCNECGKTFSHSAHLSKHQLIHAGENPFKCSKCDRVFTQRNYLVQHERTHARKKPLVCNECGKTFRQSSCLSKHQRIHSGEKPYVCDYCGKAFGLSAELVRHQRIHTGEKPYVCQECGKAFTQSSCLSIHRRVHTGEKPYRCGECGKAFAQKANLTQHQRIHTGEKPYSCNVCGKAFVLSAHLNQHLRVHTQETLYQCQRCQKAFRCHSSLSRHQRVHNKQQYCL

SEQ ID NO: 16187 - protein, 364 aa, Homo Sapiens
MERGKKKRISNKLQQTFHHSKEPTFLINQAGLLSSDSYSSLSPETESVNPGENIKTDTQKKRPGTVILSKLSSRRIISESQLSPPVIPARRPGFRVCYICGREFGSQSIAIHEPQCLQKWHIENSKLPKHLRRPEPSKPQSLSSSGSYSLQATNEAAFQSAQAQLLPCESCGRTFLPDHLLVHHRSCKPKGEGPRAPHSNSSDHLTGLKKACSGTPARPRTVICYICGKEFGTLSLPIHEPKCLEKWKMENDRLPVELHQPLPQKPQPLPNAQSSQAGPNQAQLVFCPHCSRIFTSDRLLVHQRSCKTHPYGPKYQNLNLGSKGGLKEYTNSKQQRNRAAPSVTDKVIHATQDALGEPGGALCL

SEQ ID NO: 16188 - protein, 1883 aa, Homo Sapiens; identical to SEQ ID NO: 15972

SEQ ID NO: 16189 - protein, 524 aa, Homo Sapiens
MAKRPGPPGSREMGLLTFRDIAIEFSLEEWQCLDCAQRNLYRDVMLENYRNLVSLGIAVSKPDLITCLEQNKESQNIKRNEMVAKHPVTRSHFTQDLQPEQGIKDSLQKVIPRTYGKCGHEKLQFKKCCKSVGEYEVHKGGYSEVNQCLSTTQNKIFQTHKYVKVFGKFSNSNRDKTRYTGNKHFKCNKYGKSFCMLSHLNQHQVIHTREKSYKCKECGKSFNCSSNHTTHKIIHTGEKPYRCEECGKAFSWSANLTRHKRTHTGEKPYTCEECGQAFRRSSALTNHKRIHTGERPYKCEECGKAFSVSSTLTDHKRIHTGEKPCRCEECGKAFSWSSNLTRHKRIHTREKPYACEECGQAFSLSSNLMRHRRIHTGEKPYTCEECGQDFRRSSALTIHKRIHTGERPYKCEECGKVFSLSSTLTDHKRIHTGERPYKCEECGKAFSLSSTLTDHKRIHTGERPYTCEECGKAFNCSSTLMQHKRIHTGEKPYKCEECEQAFKWHSSLAKHKIIHTGEKPYKCE

SEQ ID NO: 16190 - protein, 618 aa, Homo Sapiens
MERAVEPWGPDLHRPEEREPQRGARTGLGSENVISQPNEFEHTPQEDDLGFKEEDLAPDHEVGNASLKPEGIQNWDDLWVQREGLGKPQPRDRGPRLLGEPRWGQASSDRAAVCGECGKSFRQMSDLVKHQRTHTGEKPYKCGVCGKGFGDSSARIKHQRTHSGEKPYRARPPAQGPPKIPRSRIPAGERPTICGECGKSFRQSSDLVKHQRTHTGEKPYKCGICGKGFGDSSARIKHQRTHRGEQPPRPVVPRRQPSRAATAATQGPKAQDKPYICTDCGKRFVLSCSLLSHQRSHLGPKPFGCDVCGKEFARGSDLVKHLRVHTGEKPYLCPECGKGFADSSARVKHLRTHSGERPHACPECDRTFSLSSTLLRHRLTHMEPQDFSFPGYPLPALIPSPPPPPLGTSPPLTPRSPSHSGEPFGLPGLEPEPGGPQAGEPPPPLAGDKPHKCPECGKGFRRSSDLVKHHRVHTGEKPYLCPECGKGFADSSARVKHLRTHRGERARPPPPSTLLRPHNPPGPVPMAPRPRVRAQPSGPSQPHVCGFCGKEFPRSSDLVKHRRTHTGEKPYKCAECGKGFGDSSARIKHQRGHLVLTPFGIGDGRARPLKQEAATGLE

SEQ ID NO: 16191 - protein, 535 aa, Homo Sapiens
MLCDEKAQKRRKRKAKESGMALPQGHLTFRDVAIEFSQAEWKCLDPAQRALYKDVMLENYRNLVSLGISLPDLNINSMLEQRREPWSGESEVKIAKNSDGRECIKGVNTGSSYALGSNAEDKPIKKQLGVSFHLHLSELELFPDERVINGCNQVENFINHSSSVSCLQEMSSSVKTPIFNRNDFDDSSFLPQEQKVHLREKPYECNEHSKVFRVSSSLTKHQVIHTVEKPYKCNSCGKVFSRNSHLAEHCRIHTGEKPYKCNVCGKVFSYNSNFARHQRIHTREKPYECNECGKVFSNNSYLARHQRIHAEEKPYKCNECGKGFSHKSSLANHWRIYTGEKPYKCDECGKAFYRIALLVRHQKIHTGEKPYKCNECGKVFIQNSHLAQHWRIHTGEKPYKCNECGKVFNQLSNLARHRRIHTGEKPYKCNECGKAFSEYSGLSAHLVIHTGEKPYKCSECGKAFRHKLSLTNHQRIHTGERPYKCNECGKVFNRIAHLARHRKIHTGEKPYKCNECGKAFSRISYLAQHWTIHMG

SEQ ID NO: 16192 - protein, 744 aa, Homo Sapiens
MQAVVPLNKMTAISPEPQTLASTEQNEVPRVVTSGEQEAILRGNAADAESFRQRFRWFCYSEVAGPRKALSQLWELCNQWLRPDIHTKEQILELLVFEQFLTILPGEIRIWVKSQHPESSEEVVTLIEDLTQMLEEKDPVSQDSTVSQEENSKEDKMVTVCPNTESCESITLKDVAVNFSRGEWKKLEPFQKELYKEVLLENLRNLEFLDFPVSKLELISQLKWVELPWLLEEVSKSSRLDESALDKIIERCLRDDDHGLMEESQQYCGSSEEDHGNQGNSKGRVAQNKTLGSGSRGKKFDPDKSPFGHNFKETSDLIKHLRVYLRKKSRRYNESKKPFSFHSDLVLNRKEKTAGEKSRKSNDGGKVLSHSSALTEHQKRQKIHLGDRSQKCSKCGIIFIRRSTLSRRKTPMCEKCRKDSCQEAALNKDEGNESGEKTHKCSKCGKAFGYSASLTKHRRIHTGEKPYMCNECGKAFSDSSSLTPHHRTHSGEKPFKCDDCGKGFTLSAHLIKHQRIHTGEKPYKCKDCGRPFSDSSSLIQHQRIHTGEKPYTCSNCGKSFSHSSSLSKHQRIHTGEKPYKCGECGKAFRQNSCLTRHQRIHTGEKPYLCNDCGMTFSHFTSVIYHQRLHSGEKPYKCNQCEKAFPTHSLLSRHQRIHTGVKPYKCKECGKSFSQSSSLNEHHRIHTGEKPYECNYCGATFSRSSILVEHLKIHTGRREYECNECEKTFKSNSGLIRHRGFHSAE

SEQ ID NO: 16193 - protein, 852 aa, Homo Sapiens
MTKSLESVSFKDVTVDFSRDEWQQLDLAQKSLYREVMLENYFNLISVGCQVPKPEVIFSLEQEEPCMLDGEIPSQSRPDGDIGFGPLQQRMSEEVSFQSEININLFTRDDPYSILEELWKDDEHTRKCGENQNKPLSRVVFINKKTLANDSIFEYKDIGEIVHVNTHLVSSRKRPHNCNSCGKNLEPIITLYNRNNATENSDKTIGDGDIFTHLNSHTEVTACECNQCGKPLHHKQALIQQQKIHTRESLYLFSDYVNVFSPKSHAFAHESICAEEKQHECHECEAVFTQKSQLDGSQRVYAGICTEYEKDFSLKSNRQKTPYEGNYYKCSDYGRAFIQKSDLFRCQRIHSGEKPYEYSECEKNLPQNSNLNIHKKIHTGGKHFECTECGKAFTRKSTLSMHQKIHTGEKPYVCTECGKAFIRKSHFITHERIHTGEKPYECSDCGKSFIKKSQLHVHQRIHTGENPFICSECGKVFTHKTNLIIHQKIHTGERPYICTVCGKAFTDRSNLIKHQKIHTGEKPYKCSDCGKSFTWKSRLRIHQKCHTGERHYECSECGKAFIQKSTLSMHQRIHRGEKPYVCTECGKAFFHKSHFITHERIHTGEKPYECSICGKSFTKKSQLHVHQQIHTGEKPYRCAECGKAFTDRSNLFTHQKIHTGEKPYKCSDCGKAFTRKSGLHIHQQSHTGERHYECSECGKAFARKSTLIMHQRIHTGEKPYICNECGKSFIQKSHLNRHRRIHTGEKPYECSDCGKSFIKKSQLHEHHRIHTGEKPYICAECGKAFTIRSNLIKHQKIHTKQKPYKCSDLGKALNWKPQLSMPQKSDNGEVECSMPQLWCGDSEGDQGQLSSI

SEQ ID NO: 16194 - protein, 441 aa, Homo Sapiens
MAPRAQIQGPLTFGDVAVAFTRIEWRHLDAAQRALYRDVMLENYGNLVSVGLLSSKPKLITQLEQGAEPWTEVREAPSGTHAVEDYWFETKMSALKQSTSEASVLGERTKSVMMEKGLDWEGRSSTEKNYKCKECGKVFKYNSSFISHQRNHTSEKPHKCKECGIAFMNSSSLLNHHKVHAGKQPYRCIECGKFLKKHSTFINHQRIHSREKPHKCIECGKTFRKNSILLSHQRIHTGQKPYKCNDCGKAFAQNAALTRHERIHSGEKPFKCNKCGRAFRDNSTVLEHQKIHTGEKPYQCNECGKAFRKSSTLISHQRMHTGEKPYHCSKCGKSFRYSSSFAGHQKTHSGNKPYQCRDCGKAFTKSSTLTGHQRIHTGEKPYHCKKCGKAFRHSSGLVEHQRLHTGEKPYKCNECGKAFPRSSALKQHKKIHNKERAMKCS

SEQ ID NO: 16195 - protein, 463 aa, Homo Sapiens
MPGPLRSLEMESLQFRDVAVEFSLEEWHCLDTAQQNLYRDVMLENYRHLVFLGIIVSKPDLITCLEQGIKPLTMKRHEMIAKPPVVCSHFAQDLWPEQSIKDSYQKVILRKFEKCGHGNLHFKKGCESVDECKLHKRGYNGLNQCLTTTQSKIFQCGKYVKVFHQFSNSKRHKRRHTEKKPLKYIEGDKAFNQSSTHTTHKKIDTGEKPYKCEECGKAFNRSSHLTTHKITHTREKPYKCEECGKVFKYFSSFTTHKKIHSGEKPYICEECGKAFMYPYTLTTHKIIHTGEQPYKCKECDKAFNHPATLSSHKKIHTGEKPYTCDKCGKAFISSSILSKHEKIHTGEKPYKCEECGKAFTRSSHLTMHKIIHTGEKPYKCEECGKAFTWSAGLHKHRRTHTGEKPYKCEECGKAYTTSSNLTEHKTTHTGEKPYKCKECGKAFNWSSDLNKHKRIHIGQKPRT

SEQ ID NO: 16196 - protein, 448 aa, Homo Sapiens [sequence omitted]

SEQ ID NO: 16197 - protein, 340 aa, Homo Sapiens; identical to SEQ ID NO: 14439

SEQ ID NO: 16198 - protein, 529 aa, Homo Sapiens
MRRNSSLSFQMERPLEEQVQSKWSSSQGRTGTGGSDVLQMQNSEHHGQSIKTQTDSISLEDVAVNFTLEEWALLDPGQRNIYRDVMRATFKNLACIGEKWKDQDIEDEHKNQGRNLRSPMVEALCENKEDCPCGKSTSQIPDLNTNLETPTGLKPCDCSVCGEVFMHQVSLNRHMRSHTEQKPNECHEYGEKPHKCKECGKTFTRSSSIRTHERIHTGEKPYECKECGKAFAFLFSFRNHIRIHTGETPYECKECGKAFRYLTALRRHEKNHTGEKPYKCKQCGKAFIYYQPFLTHERTHTGEKPYECKQCGKAFSCPTYLRSHEKTHTGEKPFVCRECGRAFFSHSSLRKHVKTHTGVQPYTCKKCGEAFKSSSSCEVHERTHFGEKPYECKQCGKAFNSSSYLQLHERVHTGEKTYECKECGKAFLYSTHFRIHERTHTREKPYECKQCGRVFIYFSHLRRHERSHTGVKPCECKQCGKAFTCLNSLKVHKRIHTGERPFQCRQCGKAFSYSKSLHVHERTHSRQKP

SEQ ID NO: 16199 - protein, 437 aa, Homo Sapiens
MGERLFESAEGSQCGETFTQVPEDMLNKKTLPGVKSCESGTCGEIFMGYSSFNRNIRTDTGHQPHKCQKFLEKPYKHKQRRKALSHSHCFRTHERPHTREKPFDCKECEKSFISPASIRRYMVTHSGDGPYKCKFCGKALDCLSLYLTHERTHTGEKRYECKQCGKAFSWHSSVRIHERTHTGEKPYECKECGKSFNFSSSFRRHERTHTGEKPYKCKECGKAFNCPSSFHRHERTHTGEKPYECKLYGKALSRLISFRRHMRMHTGERPHKCKICGKAFYSPSSFQRHERSHTGEKPYKCKQCGKAFTCSTSFQYHERTHTGEKPDGCKQCGKAFRSAKYIRIHGRTHTGEKPYECKQCGKAFHCVSSFHRHERTHAGEKPYECKHCGKAFTCSIYIRIHERIHTGEKPYQCKECGKAFIRSSYCRKHERTHTINI

SEQ ID NO: 16200 - protein, 531 aa, Homo Sapiens
MLENYRNLVFVGIAASKPDLITCLEQGKEPWNVKRHEMVAEPPVVCSYFARDLWPKQGKKNYFQKVILRRYKKCGCENLQLRKYCKSMDECKVHKECYNGLNQCLTTTQNKIFQCDKYVKVFHKFSNSNRHTIRHTGKKSFKCKECEKSFCMLSHLAQHKRIHSGEKPYKCKECGKAYNETSNLSTHKRIHTGKKPYKCEECGKAFNRLSHLTTHKIIHTGKKPYKCEECGKAFNQSANLTTHKRIHTGEKPYKCEECGRAFSQSSTLTAHKIIHAGEKPYKCEECGKAFSQSSTLTTHKIIHTGEKFYKCEECGKAFSQLSHLTTHKRIHSGEKPYKCEECGKAFKQSSTLTTHKRIHAGEKFYKCEVCSKAFSRFSHLTTHKRIHTGEKPYKCEECGKAFNLSSQLTTHKIIHTGEKPYKCEECGKAFNQSSTLSKHKVIHTGEKPYKYEECGKAFNQSSHLTTHKMIHTGEKPYKCEECGKAFNNSSILNRHKMIHTGEKLYKPESCNNACDNIAKISKYKRNCAGEK

SEQ ID NO: 16201 - protein, 646 aa, Homo Sapiens
MNECNVHKEGYNELNQYLTTTQSKIFQCDKYVKVFHKLLNSNRHNTKHTGKKPFKCKKCGKSFCMLLHLCQHKRIHIRENSYRCEECGKAFIWFSTLTRHRRVHTGEKSYKYECGKSFNQDSNLTTHKRIHTGQKPYKCEECGTSFYQFSYLTRHKLIHTREKPYKCEQYGKTFNQSSTLTGHKIIHNGEKPYKCEECGKAFSIFSTPTKHKIIHTEEKSHRCEEYCKAYKESSHLTTHKRIHTGEKPYKCEECGKAFSIFSTLTKHKIIHTEEKSHRCEECGKAYKESSHLTTHKRIHTGEKPYKCEECGKTFSVFSILTKHKIIHTEEKPYKCEECGKAFKRSSTLTKHRIIHTEEKPYKCEECGKAFNQSSTLSIHKIIHTGEKPYKCEECGKAFKRSSTLTIHKMIHTGEKPYKCEECGKAFNRSSHLTTHKRIHTGHKPYKCKECGKSFSVFSTLTKHKIIHTDKKPYKCEECGKAFNRSSILSIHKKIHTGEKPYKCEECGKAFKRSSHLAGHKQIHSVQKPYKCEECGKAFSIFSTLTKHKIIHTEEKPYKCEKCGKTFYRFSNLNTHKIIHTGEKPCKCEECGKAFNHSSNLIKHKLIHTGDKPYKCEACGKAFRRSSHLSRHKIIHIGIHTEETVQK

SEQ ID NO: 16202 - protein, 587 aa, Homo Sapiens
MPTALCPRVLAPKESEEPRKMRSPPGENPSPQGELPSPESSRRLFRRFRYQEAAGPREALQRLWDLCGGWLRPERHTKEQILELLVLEQFLAILPREIQSWVRAQEPESGEQAVAAVEALEREPGRPWQWLKHCEDPVVIDDGDSPLDQEQEQLPVEPHSDLAKNQDAQPITLAQCLGLPSRPPSQLSGDPVLQDAFLLQEENVRDTQQVTTLQLPPSRVSPFKDMILCFSEEDWSLLDPAQTGFYGEFIIGEDYGVSMPPNDLAAQPDLSQGEENEPRVPELQDLQGKEVPQVSYLDSPSLQPFQVEERRKREELQVPEFQACPQTVVPQNTYPAGGNPRSLENSLDEEVTIEIVLSSSGDEDSQHGPYCTEELGSPTEKQRSLPASHRSSTEAGGEVQTSKKSYVCPNCGKIFRWRVNFIRHLRSRREQEKPHECSVCGELFSDSEDLDGHLESHEAQKPYRCGACGKSFRLNSHLLSHRRIHLQPDRLQPVEKREQAASEDADKGPKEPLENGKAKLSFQCCECGKAFQRHDHLARHRSHFHLKDKARPFQCRYCVKSFTQNYDLLRHERLHMKRRSKQALNSY

SEQ ID NO: 16203 - protein, 498 aa, Homo Sapiens
MESPRGWTLQVAPEEGQVLCNVKTATRGLSEGAVSGGWGAWENSTEVPREAGDGQRQQATLGAADEQGGPGRELGPADGGRDGAGPRSEPADRALRPSPLPEEPGCRCGECGKAFSQGSYLLQHRRVHTGEKPYTCPECGKAFAWSSNLSQHQRIHSGEKPYACRECGKAFRAHSQLIHHQETHSGLKPFRCPDCGKSFGRSTTLVQHRRTHTGEKPYECPECGKAFSWNSNFLEHRRVHTGARPHACRDCGKAFSQSSNLAEHLKIHAGARPHACPDCGKAFVRVAGLRQHRRTHSSEKPFPCAECGKAFRESSQLLQHQRTHTGERPFECAECGQAFVMGSYLAEHRRVHTGEKPHACAQCGKAFSQRSNLLSHRRTHSGAKPFACADCGKAFRGSSGLAHHRLSHTGERPFACAECGKAFRGSSELRQHQRLHSGERPFVCAHCSKAFVRKSELLSHRRTHTGERPYACGECGKPFSHRCNLNEHQKRHGGRAAP

SEQ ID NO: 16204 - protein, 480 aa, Homo Sapiens
MATVPGLQPLPTLEQDLEQEEILIVKVEEDFCLEEEPSVETEDPSPETFRQLFRLFCYQEVAGPREALSRLWELCCRWLRPELRTKEQILELLVLEQFLTVLPGEIQARVREQQPESGEEAVVLVEGLQRKPRKHRQRGSELLSDDEVPLGIGGQFLKHQAEAQPEDLSLEEEARFSSQQPPAQLSHRPQRGPLLWPERGPPAPRHQEMASASPFLSAWSQVPVNLEDVAVYLSGEEPRCMDPAQRDAPLENEGPGIQLEDGGDGREDAPLRMEWYRVLSARCQGPGHPLPGQRPAPVRGLVRPDQPRGGPPPGRRASHGADKPYTCPECGKGFSKTSHLTKHQRTHTGERPYKCLVCGKGFSDRSNFSTHQRVHTGEKPYPCPECGKRFSQSSSLVIHRRTHSGERPYACTQCGKRFNNSSHFSAHRRTHTGEKPYTCPACGRGFRRGTDLHKHQRTHMGAGSLPTLQPVAPGGPGAKA

SEQ ID NO: 16205 - protein, 271 aa, Homo Sapiens
MNSSQISLRMKHGRVNMQKKPSKCSECGKFFTQRSSLTQHQRIHRGEKPYVCSECGSCFRKQSNLTQHLRIHTGEKPYKCNECEKAFQTKAILVQHLRIHTGEKPYKCNECGKAFCQSPSLIKHQRIHTGEKPYKCTECGKAFSQSICLTRHQRSHSGDKPFKCNECGKAFNQSACLMQHQRIHSGEKPYTCTECGKAFTQNSSLVEHERTHTGEKLYKCSECEKTFRKQAHLSEHYRIHTGEKPYECVGCGKSFRHSSALLRHQRLHAGE

SEQ ID NO: 16206 - protein, 544 aa, Homo Sapiens
MLNMQGAEERDIRRETCPGWVNKNKPALEQDVCKIDSSGIVVKRFQEDEYQDSTFEEKYACEGMKENSPREIAESCLFQEGGFGRITFIHKEAPPEIISQGYNFEKSLLLTSSLVTRLRVSTEESLHQWETSNIQTNDISDQSKCPTLCTQKKSWKCNECGKTFTQSSSLTQHQRTHTGERPYTCEECGKAFSRSSFLVQHQRIHTGVKPYGCEQCGKTFRCRSFLTQHQRIHTGEKPYKCNECGNSFRNHSHLTEHQRIHTGEKPYKCNRCGKAFNQNTHLIHHQRIHTGEKPYICSECGSSFRKHSNLTQHQRIHTGEKPHKCDECGKTFQTKANLSQHQRIHSGEKPYKCKECGKAFCQSPSLIKHQRIHTGEKPYKCKECGKAFTQSTPLTKHQRIHTGERPYKCSECGKAFIQSICLIRHQRSHTGEKPYKCNECGKGFNQNTCLTQHMRIHTGEKPYKCKECGKAFAHSSSLTEHHRTHTGEKLYKCSECEKTFRKYAHLSEHYRIHTGEKPYECIECGKFFRHSSVLFRHQKLHSGD

SEQ ID NO: 16207 - protein, 646 aa, Homo Sapiens
MSTAPSLSALRSSKHSGGGGGGGGGGGADPAWTSALSGNSSGPGPGSSPAGSTKPFVHAVPPSDPLRQANRLPIKVLKMLTARTGHILHPEYLQPLPSTPVSPIELDAKKSPLALLAQTCSQIGKPDPSPSSKLSSVASNGGGAGGAGGGAAGDKDTKSGPLKLSDIGVEDKSSFKPYSKPGSDKKEPGGGGGGGGGGGGGGGGVSSEKSGFRVPSATCQPFTPRTGSPSSSASACSPGGMLSSAGGAPEGKDDKKDTDVGGGGKGTGGASAEGGPTGLAHGRISCGGGINVDVNQHPDGGPGGKALGSDCGGSSGSSSGSGPSAPTSSSVLGSGLVAPVSPYKPGQTVFPLPPAGMTYPGSLAGAYAGYPPQFLPHGVALDPTKPGSLVGAQLAAAAAGSLGCSKPAGSSPLAGASPPSVMTASLCRDPYCLSYHCASHLAGAAAASASCAHDPAAAAAALKSGYPLVYPTHPLHGVHSSLTAAAAAGATPPSLAGHPLYPYGFMLPNDPLPHICNWVSANGPCDKRFATSEELLSHLRTHTAFPGTDKLLSGYPSSSSLASAAAAAMACHMHIPTSGAPGSPGTLALRSPHHALGLSSRYHPYSKSPLPTPGAPVPVPAATGPYYSPYALYGQRLTTASALGYQ

SEQ ID NO: 16208 - protein, 444 aa, Homo Sapiens
MGPLQFRDVAIEFSLEEWHCLDAAQRNLYRDVMLENYRNLIFLGIVVSKPNLITCLEQGKKPLTMKRHEMIAKPPVMYSHFAQDLWSEQSIKDSFQKVILRRYEKCRHDNLQLKKGCESVDECPVHKRGYNGLKQCLATTQRKIFQCDEYVKFLHKFSNSNKHKIRDTGKKSFKCIEYGKTFNQSSTRTTYKKIDAGEKRYKCEECGKAYKQSSHLTTHKKIHTGEKPYKCEECGKAYKQSCNLTTHKIIHTGEKPYRCRECGKAFNHPATLFSHKKIHTGEKPYKCDKCGKAFISSSTLTKHEIIHTGEKPYKCEECGKAFNRSSNLTKHKRIHTGDVPYKCDECGKTFTWYSSLSKHKRAHTGEKPYKCEECGKAFTAFSTLTEHKIIHTGEKPYKCEECGKAFNWSSALNKHKKIHIRQKPCIVKNVENLLNVPQPLISIR

SEQ ID NO: 16209 - protein, 953 aa, Homo Sapiens
MEESSSVAMLVPDIGEQEAILTAESIISPSLEIDEQRKTKPDPLIHVIQKLSKIVENEKSQKCLLIGKKRPRSSAATHSLETQELCEIPAKVIQSPAADTRRAEMSQTNFTPDTLAQNEGKAMSYQCSLCKFLSSSFSVLKDHIKQHGQQNEVILMCSECHITSRSQEELEAHVVNDHDNDANIHTQSKAQQCVSPSSSLCRKTTERNETIPDIPVSVDNLQTHTVQTASVAEMGRRKWYAYEQYGMYRCLFCSYTCGQQRMLKTHAWKHAGEVDCSYPIFENENEPLGLLDSSAAAAPGGVDAVVIAIGESELSIHNGPSVQVQICSSEQLSSSSPLEQSAERGVHLSQSVTLDPNEEEMLEVISDAEENLIPDSLLTSAQKIISSSPNKKGHVNVIVERLPSAEETLSQKRFLMNTEMEEGKDLSLTEAQIGREGMDDVYRADKCTVDIGGLIIGWSSSEKKDELMNKGLATDENAPPGRRRTNSESLRLHSLAAEALVTMPIRAAELTRANLGHYGDINLLDPDTSQRQVDSTLAAYSKMMSPLKNSSDGLTSLNQSNSTLVALPEGRQELSDGQVKTGISMSLLTVIEKLRERTDQNASDDDILKELQDNAQCQPNSDTSLSGNNVVEYIPNAERPYRCRLCHYTSGNKGYIKQHLRVHRQRQPYQCPICEHIADNSKDLESHMIHHCKTRIYQCKQCEESFHYKSQLRNHEREQHSLPDTLSIATSNEPRISSDTADGKCVQEGNKSSVQKQYRCDVCDYTSTTYVGVRNHRRIHNSDKPYRCSLCGYVCSHPPSLKSHMWKHASDQNYNYEQVNKAINDAISQSGRVLGKSPGKTQLKSSEESADPVTGSSENAVSSSELMSQTPSEVLGTNENEKLSPTSNTSYSLEKISSLAPPSMEYCVLLFCCCICGFESTSKENLLDHMKEHEGEIVNIILNKDHNTALNTN

SEQ ID NO: 16210 - protein, 683 aa, Homo Sapiens
MSPHPEAITDCVTLNTVGQLAEGGYPLRFSTLFQEQQKMNISQASVSFKDVTIEFTQEEWQQMAPVQKNLYRDVMLENYSNLVSVGYCCFKPEVIFKLEQGEEPWFSEEEFSNQSHPKDYRGDDLIKQNKKIKDKHLEQAICINNKTLTTEEEKVLGKPFTLHVAAVASTKMSCKCNSWEVNLQSISEFIINNRNYSTKKIGCGNVCENSPFKINFEKTQTGEKFYEHNKNMKALNYNENLPKHPKFQTLEQAFECNKIGKAFNDKANCVKHNSSHTGETSSKDDEFRKNCDKKTLFDHRRTGTGKKHLHLNQCGKSFEKSTVEEYNKLNMGIKHYELNPSGNNFNRKAHLTDPQTAVIEENPLVSNDRTQTWVKSSEYHENKKSYQTSVHRVRRRSHSMMKPYKCNECGKSFCQKGHLIQHQRTHTGEKPFECSECGKTFSQKSHLSTHQRIHTAEKPYKCNECGKTFVQKSTLRGHQRIHTGEKPYECSECGKTFVQKSTLRDHHRIHTGEKSFQCNQCGKTFGQKSNLRIHQRTHTGEKTYQCNECEKSFWRKDHLIQHQKTHTGEKPFKCNECGKTFARTSTLRVHQRIHTGEKPFKCNECGKKFVRKAILSDHQRIHTGEKPFQCNKCGKTFGQKSNLRIHQRTHSGEKSYECNEYGKLCKKSTLSLYQKIQGEGNPY

SEQ ID NO: 16211 - protein, 262 aa, Homo Sapiens; identical to SEQ ID NO: 14441

SEQ ID NO: 16212 - protein, 567 aa, Homo Sapiens
MSSRLGAVPATSGPTTFKQQRSTRIVGAKNSRTQCSIKDNSFQYTIPHDDSLSGSSSASSCEPVSDFPASFRKSTYWMKMRRIKPAATSHVEGSGGVSAKGKRKPRQEEDEDYREFPQKKHKLYGRKQRPKTQPNPKSQARRIRKEPPVYAAGSLEEQWYLEIVDKGSVSCPTCQAVGRKTIEGLKKHMENCKQEMFTCHHCGKQLRSLAGMKYHVMANHNSLPILKAGDEIDEPSERERLRTVLKRLGKLRCMRESCSSSFTSIMGYLYHVRKCGKGAAELEKMTLKCHHCGKPYRSKAGLAYHLRSEHGPISFFPESGQPECLKEMNLESKSGGRVQRRSAKIAVYHLQELASAELAKEWPKRKVLQDLVPDDRKLKYTRPGLPTFSQEVLHKWKTDIKKYHRIQCPNQGCEAVYSSVSGLKAHLGSCTLGNFVAGKYKCLLCQKEFVSESGVKYHINSVHAEDWFVVNPTTTKSFEKLMKIKQRQQEEEKRRQQHRSRRSLRRRQQPGIELPETELSLRVGKDQRRNNEELVVSASCKEPEQEPVPAQFQKVKPPKTNHKRGRK

SEQ ID NO: 16213 - protein, 892 aa, Homo Sapiens
MTDPFCVGGRRLPGSSKSGPGKDGSRKEVRLPMLHDPPKMGMPVVRGGQTVPGQAPLCFDPGSPASDKTEGKKKGRPKAENQALRDIPLSLMNDWKDEFKAHSRVKCPNSGCWLEFPSIYGLKYHYQRCQGGAISDRLAFPCPFCEAAFTSKTQLEKHRIWNHMDRPLPASKPGPISRPVTISRPVGVSKPIGVSKPVTIGKPVGVSKPIGISKPVSVGRPMPVTKAIPVTRPVPVTKPVTVSRPMPVTKAMPVTKPITVTKSVPVTKPVPVTKPITVTKLVTVTKPVPVTKPVTVSRPIVVSKPVTVSRPIAISRHTPPCKMVLLTRSENKAPRATGRNSGKKRAADSLDTCPIPPKQARPENGEYGPSSMGQSSAFQLSADTSSGSLSPGSRPSGGMEALKAAGPASPPEEDPERTKHRRKQKTPKKFTGEQPSISGTFGLKGLVKAEDKARVHRSKKQEGPGPEDARKKVPAAPITVSKEAPAPVAHPAPGGPEEQWQRAIHERGEAVCPTCNVVTRKTLVGLKKHMEVCQKLQDALKCQHCRKQFKSKAGLNYHTMAEHSAKPSDAEASEGGEQEERERLRKVLKQMGRLRCPQEGCGAAFSSLMGYQYHQRRCGKPPCEVDSPSFPCTHCGKTYRSKAGHDYHVRSEHTAPPPEEPTDKSPEAEDPLGVERTPSGRVRRTSAQVAVFHLQEIAEDELARDWTKRRMKDDLVPETARLNYTRPGLPTLNPQLLEAWKNEVKEKGHVNCPNDCCEAIYSSVSGLKAHLASCSKGAHLAGKYRCLLCPKEFSSESGVKYHILKTHAENWFRTSADPPPKHRSQDSLVPKKEKKKNLAGGKKRGRKPKERTPEEPVAKLPPRRDDWPPGCRDKGARGSTGRKVGVSKAPEK

SEQ ID NO: 16214 - protein, 541 aa, Homo Sapiens
MPRRKQSHPQPVKCEGVKVDTEDSLDEGPGALVLESDLLLGQDLEFEEEEEEEEGDGNSDQLMGFERDSEGDSLGARPGLPYGLSDDESGGGRALSAESEVEEPARGPGEARGERPGPACQLCGGPTGEGPCCGAGGPGGGPLLPPRLLYSCRLCTFVSHYSSHLKRHMQTHSGEKPFRCGRCPYASAQLVNLTRHTRTHTGEKPYRCPHCPFACSSLGNLRRHQRTHAGPPTPPCPTCGFRCCTPRPARPPSPTEQEGAVPRRPEDALLLPDLSLHVPPGGASFLPDCGQLRGEGEGLCGTGSEPLPELLFPWTCRGCGQELEEGEGSRLGAAMCGRCMRGEAGGGASGGPQGPSDKGFACSLCPFATHYPNHLARHMKTHSGEKPFRCARCPYASAHLDNLKRHQRVHTGEKPYKCPLCPYACGNLANLKRHGRIHSGDKPFRCSLCNYSCNQSMNLKRHMLRHTGEKPFRCATCAYTTGHWDNYKRHQKVHGHGGAGGPGLSASEGWAPPHSPPSVLSSRGPPALGTAGSRAVHTDSS

SEQ ID NO: 16215 - protein, 400 aa, Homo Sapiens
MTFEDVAVEFSQWEWGQLNPAQKDLYREVMLENFRNLAILGLLVSKPYVICQLEEGGEPFMVEREISTGAHSDWKRRSKSKESMPSWGISKEELFQVVSVEKHIQDVLQFSKLKAACGCDGQLEMQQIKQERHLKQMSTIHKSATTLSRDYKWNGFGRSLGLRSVLVNQHSILMGEGSYKCDTEFRQTLGGNNSQRTHPEKKSCKCNECGKSFHFQSELRRHQRCHTGEKPYECSDCGRAFGHISSLIKHQRTHTGEKPYECSECGRAFSQSSSLVLHYRFHTGEKPYKCNECGRAFGHTSSLIKHQRTHTGEKPYECRECGRTFSQSSSLIVHYRFHTGEKPYKCNKCGRAFSQSSSLTQHYRFHTGEKPYKCNECGRAFAHTASLIKHQRSHAGKKTL

SEQ ID NO: 16216 - protein, 1163 aa, Homo Sapiens
MDRNREAEMELRRGPSPTRAGRGHEVDGDKATCHTCCICGKSFPFQSSLSQHMRKHTGEKPYKCPYCDHRASQKGNLKIHIRSHRTGTLIQGHEPEAGEAPLGEMRASEGLDACASPTKSASACNRLLNGASQADGARVLNGASQADSGRVLLRSSKKGAEGSACAPGEAKAAVQCSFCKSQFERKKDLELHVHQAHKPFKCRLCSYATLREESLLSHIERDHITAQGPGSGEACVENGKPELSPGEFPCEVCGQAFSQTWFLKAHMKKHRGSFDHGCHICGRRFKEPWFLKNHMKAHGPKTGSKNRPKSELDPIATINNVVQEEVIVAGLSLYEVCAKCGNLFTNLDSLNAHNAIHRRVEASRTRAPAEEGAEGPSDTKQFFLQCLNLRPSAAGDSCPGTQAGRRVAELDPVNSYQAWQLATRGKVAEPAEYLKYGAWDEALAGDVAFDKDRREYVLVSQEKRKREQDAPAAQGPPRKRASGPGDPAPAGHLDPRSAARPNRRAAATTGQGKSSECFECGKIFRTYHQMVLHSRVHRRARRERDSDGDRAARARCGSLSEGDSASQPSSPGSACAAADSPGSGLADEAAEDSGEEGAPEPAPGGQPRRCCFSEEVTSTELSSGDQSHKMGDNASERDTGESKAGIAASVSILENSSRETSRRQEQHRFSMDLKMPAFHPKQEVPVPGDGVEFPSSTGAEGQTGHPAEKLSDLHNKEHSGGGKRALAPDLMPLDLSARSTRDDPSNKETASSLQAALVVHPCPYCSHKTYYPEVLWMHKRIWHRVSCNSVAPPWIQPNGYKSIRSNLVFLSRSGRTGPPPALGGKECQPLLLARFTRTQVPGGMPGSKSGSSPLGVVTKAASMPKNKESHSGGPCALWAPGPDGYRQTKPCHGQEPHGAATQGPLAKPRQEASSKPVPAPGGGGFSRSATPTPTVIARAGAQPSANSKPVEKFGVPPAGAGFAPTNKHSAPDSLKAKFSAQPQGPPPAKGEGGAPPLPPREPPSKAAQELRTLATCAAGSRGDAALQAQPGVAGAPPVLHSIKQEPVAEGHEKRLDILNIFKTYIPKDFATLYQGWGVSGPGLEHRGTLRTQARPGEFVCIECGKSFHQPGHLRAHMRAHSVVFESDGPRGSEVHTTSADAPKQGRDHSNTGTVQTVPLRKGT

SEQ ID NO: 16217 - protein, 492 aa, Homo Sapiens
MAMALPMPGPQEAVVFEDVAVYFTRIEWSCLAPDQQALYRDVMLENYGNLASLGFLVAKPALISLLEQGEEPGALILQVAEQSVAKASLCTDSRMEAGIMESPLQRKLSRQAGLPGTVWGCLPWGHPVGGHPAPPHPHGGPEDGSDKPTHPRAREHSASPRVLQEDLGRPVGSSAPRYRCVCGKAFRYNSLLLRHQIIHTGAKPFQCTECGKAFKQSSILLRHQLIHTEEKPFQCGECGKAFRQSTQLAAHHRVHTRERPYACGECGKAFSRSSRLLQHQKFHTGEKPFACTECGKAFCRRFTLNEHGRIHSGERPYRCLRCGQRFIRGSSLLKHHRLHAQEGAQDGGVGQGALLGAAQRPQAGDPPHECPVCGRPFRHNSLLLLHLRLHTGEKPFECAECGKAFGRKSNLTLHQKIHTKEKPFACTECGKAFRRSYTLNEHYRLHSGERPYRCRACGRACSRLSTLIQHQKVHGREPGEDTEGRRAPCWAS

SEQ ID NO: 16218 - protein, 1483 aa, Homo Sapiens
MPSEQKQLFCDEKQTTLKKDYDVKNEIVDRSAPKPKISGSIHYALKNVKIDLPKINIPNEVLLKHEVDKYRKLFQSKQQTARKSISIKTVSCVEECTLLHKSERAEEEGVKMSAKILNFSCLKCRDNTRYSPNDLQKHFQMWHHGELPSYPCEMCNFSANDFQVFKQHRRTHRSTLVKCDICNNESVYTLLNLTKHFTSTHCVNGNFQCEKCKFSTQDVGTFVQHIHRHNEIHYKCGKCHHVCFTKGELQKHLHIHSGTFPFTCQYCSYGATRREHLVRHVITLHKEHLYAKEKLEKDKYEKRMAKTSAGLKLILKRYKIGASRKTFWKRKKINSGSDRSIEKNTQVLKKMNKTQTKSEDQSHVVQEHLSEEKDERLHCENNDKAPESESEKPTPLSTGQGNRAEEGPNASSGFMKTAVLGPTLKNVMMKNNKLAVSPNYNATFMGFKMMDGKQHIVLKLVPIKQNVCSPGSQSGAAKDGTANLQPQTLDTNGFLTGVTTELNDTVYMKAATPFSCSSSILSGKASSEKEMTLISQRNNMLQTMDYEKSVSSLSATSELVTASVNLTTKFETRDNVDFWGNHLTQSHPEVLGTTIKSPDKVNCVAKPNAYNSGDMHNYCINYGNCELPVESSNQGSLPFHNYSKVNNSNKRRRFSGTAVYENPQRESSSSKTVVQQPISESFLSLVRQESSKPDSLLASISLLNDKDGTLKAKSEIEEQYVLEKGQNIDGQNLYSNENQNLECATEKSKWEDFSNVDSPMMPRITSVFSLQSQQASEFLPPEVNQLLQDVLKIKPDVKQDSSNTPNKGLPLHCDQSFQKHEREGKIVESSKDFKVQGIFPVPPGSVGINVPTNDLNLKFGKEKQVSSIPQDVRDSEKMPRISGFGTLLKTQSDAIITQQLVKDKLRATTQNLGSFYMQSPLLNSEQKKTIIVQTSKGFLIPLNITNKPGLPVIPGNALPLVNSQGIPASLFVNKKPGMVLTLNNGKLEGVSAVKTEGAPARGTVTKEPCKTPILKVEPNNNCLTPGLCSSIGSCLSMKSSSENTLPLKGPYILKPTSSVKAVLIPNMLSEQQSTKLNISDSVKQQNEIFPKPPLYTFLPDGKQAVFLKCVMPNKTELLKPKLVQNSTYQNIQPKKPEGTPQRILLKIFNPVLNVTAANNLSVSNSASSLQKDNVPSNQIIGGEQKEPESRDALPFLLDDLMPANEIVITSTATCPESSEEPICVSDCSESRVLRCKTNCRIERNFNRKKTSKKIFSKTKTHGSKDSETAFVSRNRNCKRKCRDSYQEPPRRKATLHRKCKEKAKPEDVRETFGFSRPRLSKDSIRTLRLFPFSSKQLVKCPRRNQPVVVLNHPDADAPEVVSVMKTIAKFNGHVLKVSLSKRTINALLKPVCYNPPKTTYDDFSKRHKTFKPVSSVKERFVLKLTLKKTSKNNYQIVKTTSENILKAKFNCWFCGRVFDNQDTWAGHGQRHLMEATRDWNMLE

SEQ ID NO: 16219 - protein, 1074 aa, Homo Sapiens
MKDIGQQLYTTHLNGGHNSLTMSPKQPDANGAPRPNRQEAQTLLYQGSEAEAAMMTIATCAKCKSVHKISLQDLQKGTGKDGMYVCFQCSLGAAPPNFHFVSNNSSATHVGNKTENFSSSVNSKFKVRNFKPGKYYCDKCRFSTKDPLQYKKHTLQHEEIKFICSHCSYISYTKGEFQRHLVKHTGIFPYQCEYCDYGAIRNDYIVKHTKRVHERAGAKRPVKAVAKLEPKRTGTSKQNPELLKASNPRTTFQNKWSDQLSGFSLHANKDKMHNIMLLPEPKEYQKDVVCIPNKMTLSEPNEVNLFENKNVEVEVLSPAKEPVQPGMPLTVVAPAELVVPANCLAQLIDVKVVNGTQQLVLKLFPLEENNCLEAGRDNGGNSERMVKEKGSNEQEKVLSAEKTKSLTVDGNVGKLVGIDSFQPSVQKQLKNVKWVRSYDFIMPNSSVHNNGKSFINSETIEDFQKKNNLYPHRTAFPSVALKGHSLASVFKNSVLRSLGAASNPFPYKAAVCFAESGRNLHSSSQQLLPFAASPATCSFSGEKGLLPVSENDLESTSKVNIPVKVVSSNRKQEDNQTEEHKAVSTVGQISSQHKSEYLHINITGEDRSQQPGDKPLELKNSERTNNTNDGPVISSVFSLSSGSENVPEGIKWNSSTSKIKSIELLRRKIAQLIESCGKPSSLASNSAHRRSVGQASKGTSKATSEGIQEINVSLTGLGHSTGTLQKPPNDGGITGNRQLTHQQIYPHFADGSNRKTKSRVARKAHVATPVLIPKGAVLRVLNSSENAHIIEATCEAPVSIPCSERQLIKPVPFCPVRQADSDLQPLRSERGPIDMSPNIETPLRPKLRKESAVCSTIHRKTGLLYGQQGSSELNKQGRLLSRSLSISRNKTKQVHLSRKKNKIQAEPSRCLKDPSIFQVARQLRLIAAKPDQLIKCPRRNQPVIVLNHPDVDSPEVTNVMKVINKYKGNVLKVVLSERTRCQLGIRRHHVRLTYQNAEEASQIKRQMMLKMKLKKVHKNNYQVVDSLPDDSSQCVFKCWFCGRLYEDQEEWMSHGQRHLIEATRDWDVLSSKGK

SEQ ID NO: 16220 - protein, 540 aa, Homo Sapiens
MELLTFRDVAIEFSPEEWKCLDPAQQNLYRDVMLENYRNLVSLAVYSYYNQGILPEQGIQDSFKKATLGRYGSCGLENICLWKNWESIGEGEGQKECYNLCSQYLTTSHNKHLTVKGDKEYRIFQKKPQFLSAAPTEPCIPMNKYQHKFLKSVFCNKNQINFNHDSNISKHHSTHFLENYYNCNECEKVFYQSSKLIFPENIHIQKKPYNSNECGETSDPFSKLTQHQRIYIGESSQRCNKKCIIVFSQSHLKGHKIINTGEKSVKYKERGKAFTRGLHLGHQKIHTGEKPYKCKKCDKAFNKSSHLAQHQRIHTGEKPFKCKECGKAFNRGSYLTQHQRIHTGERAFKCEECGKAFNRGSYLTQHQRIHTGEKPFRCKECGKAFNRSSYVTQHQRMHTGEKPFKCKECGKAFNRASHLTQHQRIHTGEKHFKCKECGKAFNRGSHLTRHQRIHTGEKSFKCEECGKAFIWGSHLTQHQRVHTGEKFFKCKECGKAFTRSSHLTQHQRIHTGEKPFKCKECGKAFNRRSTLTQHQIIHTR

SEQ ID NO: 16221 - protein, 1311 aa, Homo Sapiens
MSRRKQAKPRSLKDPNCKLEDKTEDGEALDCKKRPEDGEELEDEAVHSCDSCLQVFESLSDITEHKINQCQLTDGVDVEDDPTCSWPASSPSSKDQTSPSHGEGCDFGEEEGGPGLPYPCQFCDKSFSRLSYLKHHEQSHSDKLPFKCTYCSRLFKHKRSRDRHIKLHTGDKKYHCSECDAAFSRSDHLKIHLKTHTSNKPYKCAICRRGFLSSSSLHGHMQVHERNKDGSQSGSRMEDWKMKDTQKCSQCEEGFDFPEDLQKHIAECHPECSPNEDRAALQCVYCHELFVEETSLMNHMEQVHSGEKKNSCSICSESFHTVEELYSHMDSHQQPESCNHSNSPSLVTVGYTSVSSTTPDSNLSVDSSTMVEAAPPIPKSRGRKRAAQQTPDMTGPSSKQAKVTYSCIYCNKQLFSSLAVLQIHLKTMHLDKPEQAHICQYCLEVLPSLYNLNEHLKQVHEAQDPGLIVSAMPAIVYQCNFCSEVVNDLNTLQEHIRCSHGFANPAAKDSNAFFCPHCYMGFLTDSSLEEHIRQVHCDLSGSRFGSPVLGTPKEPVVEVYSCSYCTNSPIFNSVLKLNKHIKENHKNIPLALNYIHNGKKSRALSPLSPVAIEQTSLKMMQAVGGAPARPTGEYICNQCGAKYTSLDSFQTHLKTHLDTVLPKLTCPQCNKEFPNQESLLKHVTIHFMITSTYYICESCDKQFTSVDDLQKHLLDMHTFVFFRCTLCQEVFDSKVSIQLHLAVKHSNEKKVYRCTSCNWDFRNETDLQLHVKHNHLENQGKVHKCIFCGESFGTEVELQCHITTHSKKYNCKFCSKAFHAIILLEKHLREKHCVFETKTPNCGTNGASEQVQKEEVELQTLLTNSQESHNSHDGSEEDVDTSEPMYGCDICGAAYTMETLLQNHQLRDHNIRPGESAIVKKKAELIKGNYKCNVCSRTFFSENGLREHMQTHLGPVKHYMCPICGERFPSLLTLTEHKVTHSKSLDTGNCRICKMPLQSEEEFLEHCQMHPDLRNSLTGFRCVVCMQTVTSTLELKIHGTFHMQKTGNGSAVQTTGRGQHVQKLYKCASCLKEFRSKQDLVKLDINGLPYGLCAGCVNLSKSASPGINVPPGTNRPGLGQNENLSAIEGKGKVGGLKTRCSSCNVKFESESELQNHIQTIHRELVPDSNSTQLKTPQVSPMPRISPSQSDEKKTYQCIKCQMVFYNEWDIQVHVANHMIDEGLNHECKLCSQTFDSPAKLQCHLIEHSFEGMGGTFKCPVCFTVFVQANKLQQHIFSAHGQEDKIYDCTQCPQKFFFQTELQNHTMTQHSS

SEQ ID NO: 16222 - protein, 264 aa, Homo Sapiens
MDTPSPDPLPSPLPGEEEKPLALSPPVPRGRRGRRPGGATSSNRTLKASLPRKRGRPPKSGQEPPLVQVQGVTAPVGSSGGSDLLLIDDQGVPYTVSEGSAAGPEGSGPRKAPHFCPVCLRAFPYLSDLERHSISHSELKPHQCKVCGKTFKRSSHLRRHCNIHAGLRPFRCPLCPRRFREAGELAHHHRVHSGERPYQCPICRLRFTEANTLRRHAKRKHPEAMGVPLCAPDPGSEPPWDEEGIPATAGAEEEEETEGKGEPA

SEQ ID NO: 16223 - protein, 670 aa, Homo Sapiens
MAEVVAEVAEMPTQMSPGAVEMSTPMSAEMMEMSTEVTEMTPGEALASSLFFQHHQFMCSECGSLYNTLEEVLSHQEQHMLAVSEEEALTTQNVGLEPELVPGAEGPFQCGECSQLILSPGELLAHQDAHLRESANQIQYQCWDCQELFPSPELWVAHRKAQHLSATVAEPPVPPPLPPPTPLPPPSPPSEVKMEPYECPECSTLCATPEEFLEHQGTHFDSLEKEERNGLEEEEEDDEEDEEDDEEMEDEEAMAEVGDDAVGGDESTAGWAQGCGDCPQHQPSAGARRQHRRTAHSPASATHPFHCSQCQRSFSSANRLQAHGRAHVGGTHECTTCSKVFKKAASLEQHLRLHRGEARYLCVDCGRGFGTELTLVAHRRAHTANPLHRCRCGKTFSNMTKFLYHRRTHAGKSGAPPTGATAPPAPAEPTPPPPPPAPPAQLPCPQCSKSFASASRLSRHRRAVHGPPERRHRCGVCGKGFKKLIHVRNHLRTHTGERPFQCHSCGKTFASLANLSRHQLTHTGARPYQCLDCGKRFTQSSNLQQHRRLHLRPVAFARAPRLPITGLYNKSPYYCGTCGRWFRAMAGLRLHQRVHARARTLTLQPPRSPSPAPPPPPEPQQTIMCTELGETIAIIETSQPLALEDTLQLCQAALGASEAGGLLQLDTAFV

SEQ ID NO: 16224 - protein, 609 aa, Homo Sapiens
MAVGLCKAMSQGLVTFRDVALDFSQEEWEWLKPSQKDLYRDVMLENYRNLVWLGLSISKPNMISLLEQGKEPWMVERKMSQGHCADWESWCEIEELSPKWFIDEDEISQEMVMERLASHGLECSSFREAWKYKGEFELHQGNAERHFMQVTAVKEISTGKRDNEFSNSGRSIPLKSVFLTQQKVPTIQQVHKFDIYDKLFPQNSVIIEYKRLHAEKESLIGNECEEFNQSTYLSKDIGIPPGEKPYESHDFSKLLSFHSLFTQHQTTHFGKLPHGYDECGDAFSCYSFFTQPQRIHSGEKPYACNDCGKAFSHDFFLSEHQRTHIGEKPYECKECNKAFRQSAHLAQHQRIHTGEKPFACNECGKAFSRYAFLVEHQRIHTGEKPYECKECNKAFRQSAHLNQHQRIHTGEKPYECNQCGKAFSRRIALTLHQRIHTGEKPFKCSECGKTFGYRSHLNQHQRIHTGEKPYECIKCGKFFRTDSQLNRHHRIHTGERPFECSKCGKAFSDALVLIHHKRSHAGEKPYECNKCGKAFSCGSYLNQHQRIHTGEKPYECSECGKAFHQILSLRLHQRIHAGEKPYKCNECGNNFSCVSALRRHQRIHNRETL

SEQ ID NO: 16225 - protein, 628 aa, Homo Sapiens
MALTQGPLKFMDVAIEFSQEEWKCLDPAQRTLYRDVMLENYRNLVSLGICLPDLSVTSMLEQKRDPWTLQSEEKIANDPDGRECIKGVNTERSSKLGSNAGNKPCKNQLGFTFQLHLSDLQLFQAERKISGCKHFEKPVSDNSSVSPLEKISSSVKSHLLNKYRNNFDHAPLLPQEQKAHIREKAYKCNEHGQVFRASASLTNQVIHNADNPYKCSECGKVFSCSSKLVIHRRMHTGEKPYKCHECGKLFSSNSNLSQHQRIHTGEKPYKCHECDKVFRSSSKLAQHQRIHTGEKPYKCHECDKVFNQIAHLVRHQKIHTGEKPYSCNKCGKVFSRHSYLAEHQTVHTGEKPYKCEECGKAFSVRSSLITHQLIHTGRKPYKCKECDKVFGRKCFLTSHQRIHTRERPYGCSQCGKIFSQKSDLIRHRKTHTDEKPYKCNKCGTAFREFSDLTAHFLIHSGEKPYECKECGKVFRYKSSLTSHHRIHTGEKPYKCNRCGKVFSRSSNLVCHQKIHTGEKPYKCNQCGKVFNQASYLTRHQIIHTGERPYRCSKCGKAFRGCSGLTAHLAIHTEKKSHECKECGKIFTQKSSLTNHHRIHIGEKPYKCTLCSKVFSHNSDLAQHQRVHS

SEQ ID NO: 16226 - protein, 563 aa, Homo Sapiens
MANSSFIGDHVHGAPHAVMPEVEFPDQFFTVLTMDHELVTLRDVVINFSQEEWEYLDSAQRNLYWDVMMENYSNLLSLDLESRNETKHLSVGKDIIQNTGSQWEVMESSKLCGLEGSIFRNDWQSKSKIDLQGPEVGYFSQMKIISENVPSYKTHESLTLPRRTHDSEKPYEYKEYEKVFSCDLEFDEYQKIHTGGKNYECNQCWKTFGIDNSSMLQLNIHTGVKPCKYMEYGNTCSFYKDFNVYQKIHNEKFYKCKEYRRTFERVGKVTPLQRVHDGEKHFECSFCGKSFRVHAQLTRHQKIHTDEKTYKCMECGKDFRFHSQLTEHQRIHTGEKPYKCMHCEKVFRISSQLIEHQRIHTGEKPYACKECGKAFGVCRELARHQRIHTGKKPYECKACGKVFRNSSSLTRHQRIHTGEKPYKCKECEKAFGVGSELTRHERIHSGQKPYECKECGKFFRLTSALIQHQRIHSGEKPYECKVCGKAFRHSSALTEHQRIHTGEKPYECKACGKAFRHSSSFTKHQRIHTDDKPYECKECGNSFSVVGHLTCQPKIYTGEKSFD

SEQ ID NO: 16227 - protein, 599 aa, Homo Sapiens
MAAALRAPTQQVFVAFEDVAIYFSQEEWELLDEMQRLLYRDVMLENFAVMASLGCWCGAVDEGTPSAESVSVEELSQGRTPKADTSTDKSHPCEICTPVLRDILQMIELHASPCGQKLYLGGASRDFWMSSNLHQLQKLDNGEKLFKVDGDQASFMMNCRFHVSGKPFTFGEVGRDFSATSGLLQHQVTPTIERPHSRIRHLRVPTGRKPLKYTESRKSFREKSVFIQHQRADSGERPYKCSECGKSFSQSSGFLRHRKAHGRTRTHECSECGKSFSRKTHLTQHQRVHTGERPYDCSECGKSFRQVSVLIQHQRVHTGERPYECSECGKSFSHSTNLYRHRSAHTSTRPYECSECGKSFSHSTNLFRHWRVHTGVRPYECSECGKAFSCNIYLIHHQRFHTGERPYVCSECGKSFGQKSVLIQHQRVHTGERPYECSECGKVFSQSSGLFRHRRAHTKTKPYECSECEKSFSCKTDLIRHQTVHTGERPYECSVCGKSFIRKTHLIRHQTVHTNERPYECDECGKSYSQSSALLQHRRVHTGERPYECRECGKSFTRKNHLIQHKTVHTGERPYECSECGKSFSQSSGLLRHRRVHVQ

SEQ ID NO: 16228 - protein, 1301 aa, Homo Sapiens
MTMGDMKTPDFDDLLAAFDIPDMVDPKAAIESGHDDHESHMKQNAHGEDDSHAPSSSDVGVSVIVKNVRNIDSSEGGEKDGHNPTGNGLHNGFLTASSLDSYSKDGAKSLKGDVPASEVTLKDSTFSQFSPISSAEEFDDDEKIEVDDPPDKEDMRSSFRSNVLTGSAPQQDYDKLKALGGENSSKTGLSTSGNVEKNKAVKRETEASSINLSVYEPFKVRKAEDKLKESSDKVLENRVLDGKLSSEKNDTSLPSVAPSKTKSSSKLSSCIAAIAALSAKKAASDSCKEPVANSRESSPLPKEVNDSPRAADKSPESQNLIDGTKKPSLKQPDSPRSISSENSSKGSPSSPAGSTPAIPKVRIKTIKTSSGEIKRTVTRVLPEVDLDSGKKPSEQTASVMASVTSLLSSPASAAVLSSPPRAPLQSAVVTNAVSPAELTPKQVTIKPVATAFLPVSAVKTAGSQVINLKLANNTTVKATVISAASVQSASSAIIKAANAIQQQTVVVPASSLANAKLVPKTVHLANLNLLPQGAQATSELRQVLTKPQQQIKQAIINAAASQPPKKVSRVQVVSSLQSSVVEAFNKVLSSVNPVPVYIPNLSPPANAGITLPTRGYKCLECGDSFALEKSLTQHYDRRSVRIEVTCNHCTKNLVFYNKCSLLSHARGHKEKGVVMQCSHLILKPVPADQMIVSPSSNTSTSTSTLQSPVGAGTHTVTKIQSGITGTVISAPSSTPITPAMPLDEDPSKLCRHSLKCLECNEVFQDETSLATHFQQAADTSGQKTCTICQMLLPNQCSYASHQRIHQHKSPYTCPECGAICRSVHFQTHVTKNCLHYTRRVGFRCVHCNVVYSDVAALKSHIQGSHCEVFYKCPICPMAFKSAPSTHSHAYTQHPGIKIGEPKIIYKCSMCDTVFTLQTLLYRHFDQHIENQKVSVFKCPDCSLLYAQKQLMMDHIKSMHGTLKSIEGPPNLGINLPLSIKPATQNSANQNKEDTKSMNGKEKLEKKSPSPVKKSMETKKVASPGWTCWECDCLFMQRDVYISHVRKEHGKQMKKHPCRQCDKSFSSSHSLCRHNRIKHKGIRKVYACSHCPDSRRTFTKRLMLEKHVQLMHGIKDPDLKEMTDATNEEETEIKEDTKVPSPKRKLEEPVLEFRPPRGAITQPLKKLKINVFKVHKCAVCGFTTENLLQFHEHIPQHKSDGSSYQCRECGLCYTSHVSLSRHLFIVHKLKEPQPVSKQNGAGEDNQQENKPSHEDESPDGAVSDRKCKVCAKTFETEAALNTHMRTHGMAFIKSKRMSSAEK

SEQ ID NO: 16229 - protein, 674 aa, Homo Sapiens
MALTQGQLSFSDVAIEFSQEEWKCLDPGQKALYRDVMLENYRNLVSLGEDNVRPEACICSGICLPDLSVTSMLEQKRDPWTLQSEVKIINNPDGRECIKGVNTEKSSKLGSSAGNKSLKNQHGLTLQLHLTEWQPFQAVRNIYGCKHVEKSISDNSSVSPVQISFFSVKTHIFNNYRNDFLFSTLLPQEQKVHIREKPYGCNEHGKVFRVSSSLTNRQVIHIADKTYKCSDCGEIFSSNSNFAQHQRIHTGEKPYKYNECGKVFNQNSHLAQHQKIHTGQKPYNNKECGKVFSHHAYLAQHRKIHTGEKPYKCSECGKAFSVCSSLTAHLVIHTGEKPYDCKECGKVFRHKSSLTTHQTVHTGERPYKCNECGKGFSRIAFLARHRKVHTGEKPYKCNECGKVFIGNSRLARHRKIHTGGRRYKCNECGKAFRTCSDLTAHLLIHTGEKPYECIDCGKVFRHKSSLTYHCRIHTGEKPYKCNECGKVFSQNSNLQRHRKIHTGEKLYKCNECGKVFRQNSHLAQHRDIHTGEKPYSCNECGKVFRRNSHLVRHRNVHTGEKPYSCNECGKVFSRNSHLARHRNIHTGEKPHSCNECGKVFSRNSHLARHRKIHTGEKLYKCNECSKVFSRNSRLAQHRNIHTGVKPYSCNECGKVFSKNSILVQHCSIHTREKP

SEQ ID NO: 16230 - protein, 1300 aa, Homo Sapiens
MEEASLCLGVSSAEPEAEPHLSGPVLNGQYAMSQKLHQITSQLSHAFPELHPRPNPEEKPPASLEEKAHVPMSGQPMGSQMALLANQLGREVDTSLNGRVDLQQFLNGQNLGIMSQMSDIEDDARKNRKYPCPLCGKRFRFNSILSLHMRTHTGEKPFKCPYCDHRAAQKGNLKIHLRTHKLGNLGKGRGRVREENRLLHELEERAILRDKQLKGSLLQPRPDLKPPPHAQQAPLAACTLALQANHSVPDVAHPVPSPKPASVQEDAVAPAAGFRCTFCKGKFKKREELDRHIRILHKPYKCTLCDFAASQEEELISHVEKAHITAESAQGQGPNGGGEQSANEFRCEVCGQVFSQAWFLKGHMRKHKDSFEHCCQICGRRFKEPWFLKNHMKVHLNKLSVKNKSPSDPEVPVPMGGMSQEAHANLYSRYLSCLQSGFMTPDKAGLSEPSQLYGKGELPMKEKEALGKLLSPISSMAHGVPEGDKHSLLGCLNLVPPLKSSCIERLQAAAKAAEMDPVNSYQAWQLMARGMAMEHGFLSKEHPLQRNHEDTLANAGVLFDKEKREYVLVGADGSKQKMPADLVHSTKVGSQRDLPSKLDPLESSRDFLSHGLNQTLEYNLQGPGNMKEKPTECPDCGRVFRTYHQVVVHSRVHKRDRKGEEDGLHVGLDERRGSGSDQESQSVSRSTTPGSSNVTEESGVGGGLSQTGSAQEDSPHPSSPSSSDIGEEAGRSAGVQQPALLRDRSLGSAMKDCPYCGKTFRTSHHLKVHLRIHTGEKPYKCPHCDYAGTQSASLKYHLERHHRERQNGAGPLSGQPPNQDHKDEMSSKASLFIRPDILRGAFKGLPGIDFRGGPASQQWTSGVLSSGDHSGQATGMSSEVPSDALKGTDLPSKSTHFSEIGRAYQSIVSNGVNFQGSLQAFMDSFVLSSLKKEKDMKDKALADPPSMKVHGVDGGEEKPSGKSSQRKSEKSQYEPLDLSVRPDAASLPGSSVTVQDSIAWHGCLFCAFTTSSMELMALHLQANHLGKAKRKDNTIGVTVNCKDQAREASKMALLPSLQSNKDLGLSNMISSLDSASEKMAQGQLKETLGEQKSGAWTGHVDPAFCNFPSDFYKQFGVYPGMVGSGASSSCPNKEPDGKAHSEEDVPILIPETTSKNTTDDLSDIASSEDMDSSKGENNDEEDVETEPEMMTKPLSALSKDSSSDGGDSLQPTGTSQPVQGLVSPLSQAPEKQWHSQGLLQAQDPLAGLPKPERGPQSLDKPMNMLSVLRAYSSDGLAAFNGLASSTANSGCIKRPDLCGK

SEQ ID NO: 16231 - protein, 660 aa, Homo Sapiens
MAHALVTFRDVAIDFSQKEWECLDTTQRKLYRDVMLENYNNLVSLGYSGSKPDVITLLEQGKEPCVVARDVTGRQCPGLLSRHKTKKLSSEKDIHEISLSKESIIEKSKTLRLKGSIFRNEWQNKSEFEGQQGLKERSISQKKIVSKKMSTDRKRPSFTLNQRIHNSEKSCDSHLVQHGKIDSDVKHDCKECGSTFNNVYQLTLHQKIHTGEKSCKCEKCGKVFSHSYQLTLHQRFHTGEKPYECQECGKTFTLYPQLNRHQKIHTGKKPYMCKKCDKGFFSRLELTQHKRIHTGKKSYECKECGKVFQLIFYFKEHERIHTGKKPYECKECGKAFSVCGQLTRHQKIHTGVKPYECKECGKTFRLSFYLTEHRRTHAGKKPYECKECGKSFNVRGQLNRHKTIHTGIKPFACKVCEKAFSYSGDLRVHSRIHTGEKPYECKECGKAFMLRSVLTEHQRLHTGVKPYECKECGKTFRVRSQISLHKKIHTDVKPYKCVRCGKTFRFGFYLTEHQRIHTGEKPYKCKECGKAFIRRGNLKEHLKIHSGLKPYDCKECGKSFSRRGQFTEHQKIHTGVKPYKCKECGKAFSRSVDLRIHQRIHTGEKPYECKQCGKAFRLNSHLTEHQRIHTGEKPYECKVCRKAFRQYSHLYQHQKTHNVI

SEQ ID NO: 16232 - protein, 1346 aa, Homo Sapiens
MDQYSLGDEGALPSEMHLPSFSESQGLNCSDTLNRDLGPNTRGFLYAGLSGLDPDPSLPTPDMSSEVLEDNLDTLSLYSGKDSDSVKLLEEYADSESQASLQDLGLGVLKAKEADEGGRATSGSARKGKRQHSSPQNPLLDCSLCGKVFSSASSLSKHYLTHSQERKHVCKICSKAFKRQDHLTGHMLTHQKTKPFVCIEQGCSKSYCDYRSLRRHYEVHHGLCILKEAPPEEEACGDSPHAHESAGQPPPSSLRSLVPPEARSPGSLLPHRDLLRRIVSSIVHQKTPSPGPAPAGASDSEGRNTACPCPASSGSSSCTPAGPHAAPAALDTELPEEPCLPQKEPATDVFTAPNSRAAENGAPDPPEPEPDTALLQARSTAECWPEGGSVPACLPLFRGQTVPASSQPSSHSFQWLRNLPGCPKSKGNNVFVVHKPSAVPSREGSESGPGPSSGSPSEESPPGPGGGLEDALPFPAALLRVPAEAPSDPRSASGEDDPCAPKKVKVDCDSFLCQNPGEPGLQEAQKAGGLPADASPLFRQLFLKSQEPLVSHEQMQVFQMITKSQRIFSHAQVAAVSSQLPAPEGKPAALRPLQGPWPQQPPPLAPAVDSLHAGPGNPEAEGSPARRRKTTPGVPREASPGSTRRDAKGGLKVAAVPTPLAAPSLDPSRNPDISSLAKQLRSSKGTLDLEDIFPSTGQRQTQLGGEEPPGASLPGKQAPAENGAASRITKGEKGPACSRGGGYRLLGNPRAPRFSGFRKEKAKMDMCCAASPSQVAMASFSSAGPPADPSKSKLTIFSRIQGGNIYRLPHPVKEENVAGRGNQQNGSPTDWTKPRSTFVCKNCSQMFYTEKGLSSHMCFHSDQWPSPRGKQEPQVFGTEFCKPLRQVLRPEGDRHSPPGTKKPLDPTAAAPLVVPQSIPVVPVTRHIGSMAMGQEKDGEERDSKESSQQRKRKKRPPPSTAGEPGPAGCHQSRLRSPMFLVDCLLKGLFQCSPYTPPPMLSPIREGSGVYFNTLCSTSTQASPDQLISSMLDQVDGSFGICVVKDDTKISIEPHINIGSRFQAEIPELQERSLAGTDEHVASLVWKPWGDMMISSETQDRVTELCNVACSSVMPGGGTNLELALHCLHEAQGNVQVALETLLLRGPHKPRTHLLADYRYTGSDVWTPIEKRLFKKAFYAHKKDFYLIHKMIQTKTVAQCVEYYYIWKKMIKFDCGRAPGLEKRVKREPEEVERTEEKVPCSPRERPSHHPTPKLKTKSYRRESILSSSPNAGSKRTPELLGSAESQGIFPCRECERVFDKIKSRNAHMKRHRLQDHVEPIIRVKWPVKPFQLKEEELGADIGPLQW

SEQ ID NO: 16233 - protein, 170 aa, Homo Sapiens
MLENYQNLVWLGLSISKSVISLLEKRKLPWIMAKEEIRGPLPGYFKVSEMTISQEPKAKTRTLFGKDVPGAEIKELSAKRAINEVLSQFDTVIKCTRNVCKECGNLYCHNMQLTLHKRNHTQKKCNQCLDCGKYFTRQSTLIQHQRIHTGERPYKCNECIKTFNQRAHLT

SEQ ID NO: 16234 - protein, 600 aa, Homo Sapiens
MAASAQVSVTFEDVAVTFTQEEWGQLDAAQRTLYQEVMLETCGLLMSLGCPLFKPELIYQLDHRQELWMATKDLSQSSYPGDNTKPKTTEPTFSHLALPEEVLLQEQLTQGASKNSQLGQSKDQDGPSEMQEVHLKIGIGPQRGKLLEKMSSERDGLGSDDGVCTKITQKQVSTEGDLYECDSHGPVTDALIREEKNSYKCEECGKVFKKNALLVQHERIHTQVKPYECTECGKTFSKSTHLLQHLIIHTGEKPYKCMECGKAFNRRSHLTRHQRIHSGEKPYKCSECGKAFTHRSTFVLHHRSHTGEKPFVCKECGKAFRDRPGFIRHYIIHTGEKPYECIECGKAFNRRSYLTWHQQIHTGVKPFECNECGKAFCESADLIQHYIIHTGEKPYKCMECGKAFNRRSHLKQHQRIHTGEKPYECSECGKAFTHCSTFVLHKRTHTGEKPYECKECGKAFSDRADLIRHFSIHTGEKPYECVECGKAFNRSSHLTRHQQIHTGEKPYECIQCGKAFCRSANLIRHSIIHTGEKPYECSECGKAFNRGSSLTHHQRIHTGRNPTIVTDVGRPFMTAQTSVNIQELLLGKEFLNITTEENLW

SEQ ID NO: 16235 - protein, 715 aa, Homo Sapiens
MEARSMLVPPQASVCFEDVAMAFTQEEWEQLDLAQRTLYREVTLETWEHIVSLGLFLSKSDVISQLEQEEDLCRAEQEAPRDWKATLEENRLNSEKDRAREELSHHVEVYRSGPEEPPSLVLGKVQDQSNQLREHQENSLRFMVLTSERLFAQREHCELELGGGYSLPSTLSLLPTTLPTSTGFPKPNSQVKELKQNSAFINHEKNGADGKHCESHQCARAFCQSIYLSKLGNVETGKKNPYEYIVSGDSLNYGSSLCFHGRTFSVKKSDDCKDYGNLFSHSVSLNEQKPVHFGKSQYECDECRETCSESLCLVQTERSGPGETPFRCEERCAAFPMASSFSDCNIIQTTEKPSVCNQCGKSFSCCKLIHQRTHTGEKPFECTQCGKSFSQSYDLVIHQRTHTGEKPYECDLCGKSFTQRSKLITHQRIHTGEKPYQCIECRKSFRWNSNLIVHQRIHTGEKPYECTHCGKSFSQSYELVTHKRTHTGEKPFKCTQCGKSFSQKYDLVVHQRTHTGEKPYECNLCGKSFSQSSKLITHQRIHTGEKPYQCIECGKSFRWNSNLVIHQRIHTGEKPYDCTHCGKSFSQSYQLVAHKRTHTGEKPYECNECGKAFNRSTQLIRHLQIHTGEKPYKCNQCNKAFARSSYLVMHQRTHTGEKPFECSQCGKAFSGSSNLLSHHRIHSGEKPYECSDCGKSFRQQSQLVVHRRTHTGEKP

SEQ ID NO: 16236 - protein, 836 aa, Homo Sapiens
MQVDPPLHGPPNDFLIFQIIPLHSLSIMPRFLWILCFSMEETQGELTSSCGSKTMANVSLAFRDVSIDLSQEEWECLDAVQRDLYKDVMLENYSNLVSLGYTIPKPDVITLLEQEKEPWIVMREGTRNWFTDLEYKYITKNLLSEKNVCKIYLSQLQTGEKSKNTIHEDTIFRNGLQCKHEFERQERHQMGCVSQMLIQKQISHPLHPKIHAREKSYECKECRKAFRQQSYLIQHLRIHTGERPYKCMECGKAFCRVGDLRVHHTIHAGERPYECKECGKAFRLHYHLTEHQRIHSGVKPYECKECGKAFSRVRDLRVHQTIHAGERPYECKECGKAFRLHYQLTEHQRIHTGERPYECKVCGKTFRVQRHISQHQKIHTGVKPYKCNECGKAFSHGSYLVQHQKIHTGEKPYECKECGKSFSFHAELARHRRIHTGEKPYECRECGKAFRLQTELTRHHRTHTGEKPYECKECGKAFICGYQLTLHLRTHTGEIPYECKECGKTFSSRYHLTQHYRIHTGEKPYICNECGKAFRLQGELTRHHRIHTCEKPYECKECGKAFIHSNQFISHQRIHTSESTYICKECGKIFSRRYNLTQHFKIHTGEKPYICNECGKAFRFQTELTQHHRIHTGEKPYKCTECGKAFIRSTHLTQHHRIHTGEKPYECTECGKTFSRHYHLTQHHRGHTGEKPYICNECGNAFICSYRLTLHQRIHTGELPYECKECGKTFSRRYHLTQHFRLHTGEKPYSCKECGNAFRLQAELTRHHIVHTGEKPYKCKECGKAFSVNSELTRHHRIHTGEKPYQCKECGKAFIRSDQLTLHQRNHISEEVLCIM

SEQ ID NO: 16237 - protein, 402 aa, Homo Sapiens
MAEMNPAQGHVVFEDVAIYFSQEEWGHLDEAQRLLYRDVMLENLALLSSLGCCHGAEDEEAPLEPGVSVGVSQVMAPKPCLSTQNTQPCETCSSLLKDILRLAEHDGTHPEQGLYTCPAHLHQHQKEQIREKLSRGDGGRPTFVKNHRVHMAGKTFLCSECGKAFSHKHKLSDHQKIHTGERTYKCSKCGILFMERSTLNRHQRTHTGERPYECNECGKAFLCKSHLVRHQTIHSGERPYECSECGKLFMWSSTLITHQRVHTGKRPYGCSECGKFFKCNSNLFRHYRIHTGKRSYGCSECGKFFMERSTLSRHQRVHTGERPYECNECGKFFSLKSVLIQHQRVHTGERPYECSECGKAFLTKSHLICHQTVHTAAKQCSECGKFFRYNSTLLRHQKVHTG

SEQ ID NO: 16238 - protein, 533 aa, Homo Sapiens
MNLTEGRVVFEDVAIYFSQEEWGHLDEAQRLLYRDVMLENLALLSSLGSWHGAEDEEAPSQQGFSVGVSEVTASKPCLSSQKVHPSETCGPPLKDILCLVEHNGIHPEQHIYICEAELFQHPKQQIGENLSRGDDWIPSFGKNHRVHMAEEIFTCMEGWKDLPATSCLLQHQGPQSEWKPYRDTEDREAFQTGQNDYKCSECGKTFTCSYSFVEHQKIHTGERSYECNKCGKFFKYSANFMKHQTVHTSERTYECRECGKSFMYNYRLMRHKRVHTGERPYECNTCGKFFRYSSTFVRHQRVHTGERPYECRECGKFFMDSSTLIKHQRVHTGERPYKCNDCGKFFRYISTLIRHQRIHTGERPYECSVCGELFRYNSSLVKHWRNHTGERPYKCSECGKSFRYHCRLIRHQRVHTGERPYECSECGKFFRYNSNLIKHWRNHTGERPYECRECGKAFSHKHILVEHQKIHSGERPYECSECQKAFIRKSHLVHHQKIHSEERLVCSMNVGNSLAKTPTSLNIRDFTMEKVYH

SEQ ID NO: 16239 - protein, 640 aa, Homo Sapiens
MAEAALVITPQIPMVTEEFVKPSQGHVTFEDIAVYFSQEEWGLLDEAQRCLYHDVMLENFSLMASVGCLHGIEAEEAPSEQTLSAQGVSQARTPKLGPSIPNAHSCEMCILVMKDILYLSEHQGTLPWQKPYTSVASGKWFSFGSNLQQHQNQDSGEKHIRKEESSALLLNSCKIPLSDNLFPCKDVEKDFPTILGLLQHQTTHSRQEYAHRSRETFQQRRYKCEQVFNEKVHVTEHQRVHTGEKAYKRREYGKSLNSKYLFVEHQRTHNAEKPYVCNICGKSFLHKQTLVGHQQRIHTRERSYVCIECGKSLSSKYSLVEHQRTHNGEKPYVCNVCGKSFRHKQTFVGHQQRIHTGERPYVCMECGKSFIHSYDRIRHQRVHTGEGAYQCSECGKSFIYKQSLLDHHRIHTGERPYECKECGKAFIHKKRLLEHQRIHTGEKPYVCIICGKSFIRSSDYMRHQRIHTGERAYECSDCGKAFISKQTLLKHHKIHTRERPYECSECGKGFYLEVKLLQHQRIHTREQLCECNECGKVFSHQKRLLEHQKVHTGEKPCECSECGKCFRHRTSLIQHQKVHSGERPYNCTACEKAFIYKNKLVEHQRIHTGEKPYECGKCGKAFNKRYSLVRHQKVHITEEP

SEQ ID NO: 16240 - protein, 422 aa, Homo Sapiens
MAETKDAAQMLVTFKDVAVTFTREEWRQLDLAQRTLYREVMLETCGLLVSLGHRVPKPELVHLLEHGQELWIVKRGLSHATCAGDRAQVHTREPTTYPPVLSERAFLRGSLTLESSTSSDSRLGRARDEEGLLEMQKGKVTPETDLHKETHLGKVSLEGEGLGTDDGLHSRALQEWLSADVLHECDSQQPGKDALIHAGTNPYKCKQCGKGFNRKWYLVRHQRVHTGMKPYECNACGKAFSQSSTLIRHYLIHTGEKPYKCLECGKAFKRRSYLMQHHPIHTGEKPYECSQCRKAFTHRSTFIRHNRTHTGEKPFECKECEKAFSNRAHLIQHYIIHTGEKPYDCMACGKAFRCSSELIQHQRIHTGEKPYECTQCGKAFHRSTYLIQHSVIHTGEMPYKCIECGKAFKRRSHLLQHQRVHT

SEQ ID NO: 16241 - protein, 407 aa, Homo Sapiens
MAAAALRFPVQGTVTFEDVAVKFTQEEWNLLSEAQRCLYRDVTLENLALMSSLGCWCGVEDEAAPSKQSIYIQRETQVRTPMAGVSPKKAHPCEMCGPILGDILHVADHQGTHHKQKLHRCEAWGNKLYDSGNFHQHQNEHIGEKPYRGSVEEALFAKRCKLHVSGESSVFSESGKDFLLRSGLLQQEATHTGKSNSKTECVSLFHGGKSHYSCGGCMKHFSTKDILSQHERLLPTEEPSVWCECGKSSSKYDSFSNHQGVHTREKPYTCGICGKLFNSKSHLLVHQRIHTGEKPYECEVCQKFFRHKYHLIAHQRVHTGERPYECSDCGKSFTHSSTFRVHKRVHTGQKPYECSECGKSFAESSSLTKHRRVHTGEKPYGCSECEKKFRQISSLRHHQRVHKRKGL

SEQ ID NO: 16242 - protein, 538 aa, Homo Sapiens
MVTCAHLGRRARLPAAQPSACPGTCFSQEERMAAGYLPRWSQELVTFEDVSMDFSQEEWELLEPAQKNLYREVMLENYRNVVSLEALKNQCTDVGIKEGPLSPAQTSQVTSLSSWTGYLLFQPVASSHLEQREALWIEEKGTPQASCSDWMTVLRNQDSTYKKVALQEEPASGINMIKLIREDGGWKQLEDSHEDPQGLLSQKASLHVVAVPQEKATAWHGFGENGNLSPALVLSQGSSKGNHLCGSELDITSLASDSVLNHHQLGYADRRPCESNECGNAIRQNSHFIQHGGKMFVYLENGQSLNHGMALTIHNKINTAEKPFECHQCGKVFNRRHSLSEHQRIHTGEKPYECQECGRAFTHSSTLTRHLRTHTGEKPYGCGECGKAFNRISSLTQHQRIHTGEKPYKCEDCGKSFCQSSYLILHKRTHTGEKPYECSECGKAFSDRSSLNQHERTHTGENPYECKQCGRAFSQRSSLVRHERTHTGEKPYRCQECGKAFSQSSSLVTHQKTHSSQKTYKIIDCGKAFYQNRHLIGY

SEQ ID NO: 16243 - protein, 628 aa, Homo Sapiens
MDSVVFEDVAVDFTLEEWALLDSAQRDLYRDVMLETFQNLASVDDETQFKASGSVSQQDIYGEKIPKESKIATFTRNVSWASVLGKIWDSLSIEDQTTNQGRNLSRNHGLERLCESNDQCGEALSQIPHLNLYKKIPPGVKQYEYNTYGKVFMHRRTSLKSPITVHTGHKPYQCQECGQAYSCRSHLRMHVRTHNGERPYVCKLCGKTFPRTSSLNRHVRIHTAEKTYECKQCGKAFIDFSSLTSHLRSHTGEKPYKCKECGKAFSYSSTFRRHTITHTGEKPYKCKECAEAFSYSSTFRRHMISHTGEKPHKCKECGEAFSYSSAFRRHMITHTGEKPYECKQCGKTFIYLQSFRRHERIHTGEKPYECKQCGKTFIYPQSFRRHERTHGGEKPYECNQCGKAFSHPSSFRGHMRVHTGEKPYECKQCGKTFNWPISLRKHMRTHTREKPYECKQCGKAFSLSACFREHVRMHPEDKSYECKLCGKAFYCHISLQKHMRRHTAEKLYKCKQCGKAFSWPELLQQHVRTHTVEKPYECKECGKVFKWPSSLPIHMRLHTGEKPYQCKHCGKAFNCSSSLRRHVRIHTTEKQYKCNVGHPPANEFMCSASEKSHQERDLIKVVNMVLPL

SEQ ID NO: 16244 - protein, 456 aa, Homo Sapiens
MDTVVFEDVVVDFTLEEWALLNPAQRKLYRDVMLETFKHLASVDNEAQLKASGSISQQDTSGEKLSLKQKIEKFTRKNIWASLLGKNWEEHSVKDKHNTKERHLSRNPRVERPCKSSKGNKRGRTFRKTRNCNRHLRKNCCTSVRRYECSQCGKLFTHSSSLIRHKRAHSGQKLYKCKECGKAFSRPSYLQTHEKTHSGEKPYACQSCGKTFLRSHSLTEHVRTHTGEKPYECGQCGKGFSCPKSFRAHVMMHAGGRPYECKHCGKAFRCQKSFRVHMIMHAGGRPYECKQCGKAYCWATSFQRHVRIHNGEKPYKCGKCGKAFGWPSSLHKHARTHAKKKPVSGGSVGKSSARPRPSTDVKSQTREKVYKCETCGKTYGWSSSLHKHERKHTGEKPVNAASVGKPSGGLCSSKNVRTQIGQKPSKCEKCGKAFSCPKAFQGHVRSHTGKKSCTSK

SEQ ID NO: 16245 - protein, 423 aa, Homo Sapiens
MAAVVLPPTAASQREGHTEGGELVNELLKSWLKGLVTFEDVAVEFTQEEWALLDPAQRTLYRDVMLENCRNLASLGNQVDKPRLISQLEQEDKVMTEERGILSGTCPDVENPFKAKGLTPKLHVFRKEQSRNMKMERNHLGATLNECNQCFKVFSTKSSLTRHRKIHTGERPYGCSECGKSYSSRSYLAVHKRIHNGEKPYECNDCGKTFSSRSYLTVHKRIHNGEKPYECSDCGKTFSNSSYLRPHLRIHTGEKPYKCNQCFREFRTQSIFTRHKRVHTGEGHYVCNQCGKAFGTRSSLSSHYSIHTGEYPYECHDCGRTFRRRSNLTQHIRTHTGEKPYTCNECGKSFTNSFSLTIHRRIHNGEKSYECSDCGKSFNVLSSVKKHMRTHTGKKPYECNYCGKSFTSNSYLSVHTRMHNRQM

SEQ ID NO: 16246 - protein, 402 aa, Homo Sapiens
MAAVILPSTAAPSSLFPASQQKGHTQGGELVNELLTSWLRGLVTFEDVAVEFTQEEWALLDPAQRTLYRDVMLENCRNLASLGCRVNKPSLISQLEQDKKVVTEERGILPSTCPDLETLLKAKWLTPKKNVFRKEQSKGVKTERSHRGVKLNECNQCFKVFSTKSNLTQHKRIHTGEKPYDCSQCGKSFSSRSYLTIHKRIHNGEKPYECNHCGKAFSDPSSLRLHLRIHTGEKPYECNQCFHVFRTSCNLKSHKRIHTGENHHECNQCGKAFSTRSSLTGHNSIHTGEKPYECHDCGKTFRKSSYLTQHVRTHTGEKPYECNECGKSFSSSFSLTVHKRIHTGEKPYECSDCGKAFNNLSAVKKHLRTHTGEKPYECNHCGKSFTSNSYLSVHKRIHNRWI

SEQ ID NO: 16247 - protein, 538 aa, Homo Sapiens
MVAGWLTNYSQDSVTFEDVAVDFTQEEWTLLDQTQRNLYRDVMLENYKNLVAVDWESHINTKWSAPQQNFLQGKTSSVVEMERNHFGEELFDFNQCEKALSEHSCLKTHRRTYFRKKTCECNQCEKAFRKPSIFTLHKKTDIGEELPNCNQCETAFSQHLHLVCKKTSQNLHLVCKKTHTQEKPYKCSDCEKGLPSSSHLRECVRIYGGERPYTHKEYVETFSHSTALFVHMQTQDGEKFYECKACGKPFTESSYLTQHLRTHSRVLPIEHKKFGKAFAFSPDLAKHIRLRTRGKHYVCNECGKEFTCFSKLNIHIRVHTGEKPYECNKCGKAFTDSSGLIKHRRTHTGEKPYECKECGKAFANSSHLTVHMRTHTGEKPYQCKECGKAFINSSSFKSHMQTHPGVKPYDCQQCGKAFIRSSFLIRHLRSHSAERPFECEECGKAFRYSSHLSQHKRIHTGERPYKCQKCGQAFSISSGLTVHMRTHTGERPFECQECGKAFTRSTYLIRHLRSHSVEKPYKECGQTFSNSSCLTECV

SEQ ID NO: 16248 - protein, 161 aa, Homo Sapiens
MGPLQFRDVAIEFSLEEWHCLDTAQWNLYRDVMLENYRHLVFLVCGKAFNSSSNLTTHKKIHTGEKPYRCEECGKAFKRSSHLTVHKIVHTGEKSYKCEECGKAFKHPSHVTAHKKIHTGGKPYKCEECGKDFKYTSTLIAHKRIHTGEKPYKCEECGKDF

SEQ ID NO: 16249 - protein, 790 aa, Homo Sapiens
MAYCLTNCYQYSVTFEDTAVDFTQEEWILLDPVQRNLYRDVMLENYENVAKVGFQLFKPSVISWLEEEELRTLQQGVLQDWAIKHQTSVSALQQEFWKIQTSNGIQMDLVTFDSVAVEFTQEEWTLLDPAQRNLYSDVMLENYKNLSSVGYQLFKPSLISWLEEEEELSTLPRVLQEWKMCLKTKGPALWQDNFCLKTLNGIQLARNQNGEELYDCKQCEDVFCKHPCLKTNMSTQNRGNTSECIQYAKDLLSLYNKTSTIRKVSVFSKHGKSFRLILNVQVQRKCTQDKSFEGTDYGKAFIYQSYLEAHRKTQSGEKLNEWKQCGEAFTHSTSHAVNVETHIIKNPYECKECGKDFRYPTHLNNHMQTHIGIKPYKCKHCGKTFTVPSGFLEHVRTHTGEKPYGCKECGKAFGTSAGLIEHIRCHAREKTFKCDHCGKAFISYPSLFGHLRVHNGEKPYEHKEYGKAFGTSSGVIEDRRSNTGQKRFDCDQCGKVFVSFSSLFAHLRTHTGEKPFKCYKCGKPFTSSACLRIHMRTHTEERLYQCKKCGKAFTKCSYLTKHLRTHAGEKPYECMKCGKAFTERSYLTKHLRRHSGEKPYECKKCGKAFTERSDLTKHLRRHTGDKPYEYKDCGKAFVVSSSLVDHLRTHTGYKPYKCNACEKAYSRSCVLTQHLKTHAAEKTSECNACGNSFRNSMCFHDRLKTLTKIKPYKCKDCGKAFTCHSDLTNHVRIHTGEKPYKCKECGKAFRTSSGRIQHLRTHMGEKPFECDQCGKAFASFSARIAHLKTH

SEQ ID NO: 16250 - protein, 486 aa, Homo Sapiens
MAAIYLSRGFFSREPICPFEEKTKVERMVEDYLASGYQDSVTFDDVAVDFTPEEWALLDTTEKYLYRDVMLENYMNLASVEWEIQPRTKRSSLQQGFLKNQIFSGIQMTRGYSGWKLCDCKNCGEVFREQFCLKTHMRVQNGGNTSEGNCYGKDTLSVHKEASTGQELSKFNPCGKVFTLTPGLAVHLEVLNARQPYKCKECGKGFKYFASLDNHMGIHTDEKLCEFQEYGRAVTASSHLKQCVAVHTGKKSKKTKKCGKSFTNFSQLYAPVKTHKGEKSFECKECGRSFRNSSCLNDHIQIHTGIKPHKCTYCGKAFTRSTQLTEHVRTHTGIKPYECKECGQAFAQYSGLSIHIRSHSGKKPYQCKECGKAFTTSTSLIQHTRIHTGEKPYECVECGKTFITSSRRSKHLKTHSGEKPFVCKICGKAFLYSSRLNVHLRTHTGEKPFVCKECGKAFAVSSRLSRHERIHTGEKPYECKDMSVTI

SEQ ID NO: 16251 - protein, 426 aa, Homo Sapiens
MSAFDMSHGFFPREPICPFEEKTKIGTMVEDHRSNSYQDSVTFDDVAVEFTPEEWALLDTTQKYLYRDVMLENYMNLASVDFFFCLTSEWEIQPRTKRSSLQQGFLKNQIFTGIQMQTRSYSGWKLCENCGEVFSEQFCLKTHMRAQNGGNTFEGNCYGKDSISVHKEASIGQELSKFNPCGKVFTLTPGLAVHLEILNGRQPYKCKECGKGFKYFASLDNHMGIHIGEKLCEFQECERAITTSSHLKQCVAVHTGKKSEKTKNCGKSFTNFSQLSAHAKTHKGEKSFECKECGRSFRNSSSFNVHIQIHTGIKPHKCTECGKAFTRSTHLTQHVRTHTGIKPYECKECGQAFTQYTGLAIHIRNHTGEKPYQCKECGKAFNRSSTLTQHRRIHTGEKPYECVECGKTFITSSHRSKHLKTHSGER

SEQ ID NO: 16252 - protein, 476 aa, Homo Sapiens
MDAVAFEDVAVNFTQEEWALLGPSQKNLYRYVMQETIRNLDCIRMIWEEQNTEDQYKNPRRNLRCHMVERFSESKDSSQCGETFSLIRDSIVNNSICPGEDPCQSAECEEVIMGHLSLNSHIRVDSGHKPHEYQEYGEKPHTHKQRGKAFSYHHSFQSRGRPHTGKKRYECKECGKTFSSRRNLRRHMVVQGGNRPYKCKLCGKAFFWPSLLRMHERTHTGEKPYECKQCSKAFPFYSSYRRHERMHTGEKPYECKQCSKALPDSSSYIRHERTHTGEKPYTCKQCGKAFSVSSSLRRHETTHSAEKPYECKQCGKTFHHLGSFQIHMKRHTGDRPHKCKICGKGFDRPSLVRYHERIHTGEKPYECKQCGKTLSHSSSFRRHMIMHTGGGPHKCKICGKAFVYPSVCQRHEKSHSGEKPYECKQCGKALSHSSSFRRHMVMHTGDGPNKCKVCGKAFVYPSVCQRHEKTHWRETI

SEQ ID NO: 16253 - protein, 553 aa, Homo Sapiens
MDSVASEDVAVNFTLEEWALLDPSQKKLYRDVMRETFRNLACVGKKWEDQSIEDWYKNQGRILRNHMEEGLSESKEYDQCGEAFSQILNLNLNKKIPTIVRPCECSLCGKVFMHHSSLSRHIRSHLGHKPYDYQEYGEKPYKCKQCGKAFSSCQSFRRHERTHTGEKPYACPECGKAFISLPSVRRHMIKHTGDGPYKCQECGKAFDRPSLFQIHERTHTGEKPYECQECAKAFISLPSFQRHMIRHTGDGPYKCQECGKAFDRPSLFRIHERTHTGEKPHECKQCGKAFISFTNFQSHMIRHTGDGPYKCKVCGRAFIFPSYVRKHERTHTGEKPYECNKCGKTFSSSSNVRTHERTHTGEKPYECKECGKAFISLPSVRRHMIKHTGDGPYKCQVCGRAFDCPSSFQIHERTHTGEKPYECQVCGKAFISLKRIRKHMILHTGDGPYKCQVCGKAFDCPSSVRTHERTHTGEKPYECKECGKAFNYASSIRIHERTHTGEKPYECKQCGKTFSYSSSFQRHERAHNGDKPYVKNVGKLSFITQPSNTCENE

SEQ ID NO: 16254 - protein, 539 aa, Homo Sapiens
MRRGPWERWSLASHRLDAGLCTCPREESREIRAGQIVLKAMAQGLVTFRDVAIEFSLEEWKCLEPAQRDLYREVTLENFGHLASLGLSISKPDVVSLLEQGKEPWMIANDVTGPWCPDLESRCEKFLQKDIFEIGAFNWEIMESLKCSDLEGSDFRADWECEGQFERQVNEECYFKQVNVTYGHMPVFQHHTSHTVRQSRETGEKLMECHECGKAFSRGSHLIQHQKIHTGEKPFGCKECGKAFSRASHLVQHQRIHTGEKPYDCKDCGKAFGRTSELILHQRLHTGVKPYECKECGKTFRQHSQLILHQRTHTGEKPYVCKDCGKAFIRGSQLTVHRRIHTGARPYECKECGKAFRQHSQLTVHQRIHTGEKPYECKECGKGFIHSSEVTRHQRIHSGEKPYECKECGKAFRQHAQLTRHQRVHTGDRPYECKDCGKAFSRSSYLIQHQRIHTGDKPYECKECGKAFIRVSQLTHHQRIHTCEKPYECRECGMAFIRSSQLTEHQRIHPGIKPYECRECGQAFILGSQLIEHYRIHTG

SEQ ID NO: 16255 - protein, 418 aa, Homo Sapiens
MAQESVMFSDVSVDFSQEEWECLNDDQRDLYRDVMLENYSNLVSMGHSISKPNVISYLEQGKEPWLADRELTRGQWPVLESRCETKKLFLKKEIYEIESTQWEIMEKLTRRDFQCSSFRDDWECNRQFKKELGSQGGHFNQLVFTHEDLPTLSHHPSFTLQQIINSKKKFCASKEYRKTFRHGSQFATHEIIHTIEKPYECKECGKSFRHPSRLTHHQKIHTGKKPFECKECGKTFICGSDLTRHHRIHTGEKPYECKECGKAFSSGSNFTRHQRIHTGEKPYECKECGKAFSSGSNFTQHQRIHTGEKPYECKECGNAFSQSSQLIKHQRIHTGEKPYECKECEKAFRSGSDLTRHQRIHTGEKPYECKICGKAYSQSSQLISHHRIHTSEKPYEYRECGKNFNYDPQLIQHQNLYW

SEQ ID NO: 16256 - protein, 647 aa, Homo Sapiens
MAQGSVSFNDVTVDFTQEEWQHLDHAQKTLYMDVMLENYCHLISVGCHMTKPDVILKLERGEEPWTSFAGHTCLEENWKAEDFLVKFKEHQEKYSRSVVSINHKKLVKEKSKIYEKTFTLGKNPVNSKNLPPEYDTHGRILKNVSELIISNLNPARKRLSEYNGYGKSLLSTKQETTHPEVKSHNQSARAFSHNEVLMQYQKTETPAQSFGYNDCEKSFLQRGGLITHSRPYKGENPSVYNKKRRATNIEKKHTCNECGKSFCRKSVLILHQGIHSEEKPYQCHQCGNAFRRKSYLIDHQRTHTGEKPFVCNECGKSFRLKTALTDHQRTHTGEKSYECLQCRNAFRLKSHLIRHQRTHTGEKPYECNDCGKSFRQKTTLSLHQRIHTGEKPYICKECGKSFHQKANLTVHQRTHTGEKPYICNECGKSFSQKTTLALHEKTHNEEKPYICSECGKSFRQKTTLVAHQRTHTGEKSYECPHCGKAFRMKSYLIDHHRTHTGEKPYECNECGKSFSQKTNLNLHQRIHTGEKPYVCNECGKSFRQKATLTVHQKIHTGQKSYECPQCGKAFSRKSYLIHHQRTHTGEKPYKCSECGKCFRQKTNLIVHQRTHTGEKPYVCNECGKSFSYKRNLIVHQRTHKGENIEMQ

SEQ ID NO: 16257 - protein, 644 aa, Homo Sapiens
MTSQSSVISNSCVTMERLSHMMERKAWCSQESALSEEEEDTTRPLETVTFKDVAVDLTQEEWEQMKPAQRNLYRDVMLENYSNLVTVGCQVTKPDVIFKLEQEEEPWVMEEEMFGRHCPEVWEVDEQIKKQQETLVRKVTSISKKILIKEKVIECKKVAKIFPLSSDIVTSRQSFYDCDSLDKGLEHNLDLLRYEKGCVREKQSNEFGKPFYHCASYVVTPFKCNQCGQDFSHKFDLIRHERIHAGEKPYECKECGKAFSRKENLITHQKIHTGEKPYKCNECGKAFIQMSNLIRHHRIHTGEKPYACKDCWKAFSQKSNLIEHERIHTGEKPYECKECGKSFSQKQNLIEHEKIHTGEKPYACNECGRAFSRMSSVTLHMRSHTGEKPYKCNKCGKAFSQCSVFIIHMRSHTGEKPYVCSECGKAFSQSSSLTVHMRNHTAEKPYECKECGKAFSRKENLITHQKIHTGEKPYECSECGKAFIQMSNLIRHQRIHTGEKPYACTVCGKAFSQKSNLTEHEKIHTGEKPYHCNQCGKAFSQRQNLLEHEKIHTGEKPFKCNECGKAFSRISSLTLHVRSHTGEKPYECNKCGKAFSQCSLLIIHMRSHTGEKPFECNECGKAFSQRASLSIHKRGHTGERHQVY

SEQ ID NO: 16258 - protein, 686 aa, Homo Sapiens
MTESQGTVTFKDVAIDFTQEEWKRLDPAQRKLYRNVMLENYNNLITVGYPFTKPDVIFKLEQEEEPWVMEEEVLRRHWQGEIWGVDEHQKNQDRLLRQVEVKFQKTLTEEKGNECQKKFANVFPLNSDFFPSRHNLYEYDLFGKCLEHNFDCHNNVKCLMRKEHCEYNEPVKSYGNSSSHFVITPFKCNHCGKGFNQTLDLIRHLRIHTGEKPYECSNCRKAFSHKEKLIKHYKIHSREQSYKCNECGKAFIKMSNLIRHQRIHTGEKPYACKECEKSFSQKSNLIDHEKIHTGEKPYECNECGKAFSQKQSLIAHQKVHTGEKPYACNECGKAFPRIASLALHMRSHTGEKPYKCDKCGKAFSQFSMLIIHVRIHTGEKPYECNECGKAFSQSSALTVHMRSHTGEKPYECKECRKAFSHKKNFITHQKIHTREKPYECNECGKAFIQMSNLVRHQRIHTGEKPYICKECGKAFSQKSNLIAHEKIHSGEKPYECNECGKAFSQKQNFITHQKVHTGEKPYDCNECGKAFSQIASLTLHLRSHTGEKPYECDKCGKAFSQCSLLNLHMRSHTGEKPYVCNECGKAFSQRTSLIVHMRGHTGEKPYECNKCGKAFSQSSSLTIHIRGHTGEKPFDCSKCGKAFSQISSLTLHMRKHTGEKPYHCIECGKAFSQKSHLVRHQRIHTH

SEQ ID NO: 16259 - protein, 555 aa, Homo Sapiens
MDSVVFEDVAVDFTLEEWALLDSAQRDLYRDVMLETFRNLASVDDGTQFKANGSVSLQDMYGQEKSKEQTIPNFTGNNSCAYTLEKNCEGYGTEDHHKNLRNHMVDRFCTHNEGNQYGEAIHQMPDLTLHKKVSAGEKPYECTKCRTVFTHLSSLKRHVKSHCGRKAPPGEECKQACICPSHLHSHGRTDTEEKPYKCQACGQTFQHPRYLSHHVKTHTAEKTYKCEQCRMAFNGFASFTRHVRTHTKDRPYKCQECGRAFIYPSTFQRHMTTHTGEKPYKCQHCGKAFTYPQAFQRHEKTHTGEKPYECKQCGKTFSWSETLRVHMRIHTGDKLYKCEHCGKAFTSSRSFQGHLRTHTGEKPYECKQCGKAFTWSSTFREHVRIHTQEQLYKCEQCGKAFTSSRSFRGHLRTHTGEKPYECKQCGKTFTWSSTFREHVRIHTQEQLHKCEHCGKAFTSSRAFQGHLRMHTGEKPYECKQCGKTFTWSSTLHNHVRMHTGEKPHKCKQCGMSFKWHSSFRNHLRMHTGQKSHECQSYSKAFSCQVILSKTSESTH

SEQ ID NO: 16260 - protein, 536 aa, Homo Sapiens; identical to SEQ ID NO: 14444

SEQ ID NO: 16261 - protein, 609 aa, Homo Sapiens
MPHLLVTFRDVAIDFSQEEWECLDPAQRDLYRDVMLENYSNLISLDLESSCVTKKLSPEKEIYEMESLQWENMGKRINHHLQYNGLGDNMECKGNLEGQEASQEGLYMCVKITCEEKATESHSTSSTFHRIIPTKEKLYKCKECRQGFSYLSCLIQHEENHNIEKCSEVKKHRNTFSKKPSYIQHQRIQTGEKPYECMECGKAFGRTSDLIQHQKIHTNEKPYQCNACGKAFIRGSQLTEHQRVHTGEKPYECKKCGKAFSYCSQYTLHQRIHSGEKPYECKDCGKAFILGSQLTYHQRIHSGEKPYECKECGKAFILGSHLTYHQRVHTGEKPYICKECGKAFLCASQLNEHQRIHTGEKPYECKECGKTFFRGSQLTYHLRVHSGERPYKCKECGKAFISNSNLIQHQRIHTGEKPYKCKECGKAFICGKQLSEHQRIHTGEKPFECKECGKAFIRVAYLTQHEKIHGEKHYECKECGKTFVRATQLTYHQRIHTGEKPYKCKECDKAFIYGSQLSEHQRIHRGEKPYECKQCGKAFIRGSHLTEHLRTHTGEKPYECKECGRAFSRGSELTLHQRIHTGEKPYTCVQCGKDFRCPSQLTQHTRLHN

SEQ ID NO: 16262 - protein, 529 aa, Homo Sapiens
MEQEKKLLVSDSNSFMERESLKSPFTGDTSMNNLETVHHNNSKADKLKEKPSEWSKRHRPQHYKHEDAKEMPLTWVQDEIWCHDSYESDGKSENWGNFIAKEEEKPNHQEWDSGEHTNACVQQNSSFVDRPYKCSECWKSFSNSSHLRTHQRTHSGEKPYKCSECAKCFCNSSHLIQHLRMHTGEKPYQCGECGKSFSNTSHLIIHERTHTGEKPYKCPECGKRFSSSSHLIQHHRSHTGEKPYECSVCGKGFSHSYVLIEHQRTHTGEKPYKCPDCGKSFSQSSSLIRHQRTHTGEKPYKCLECEKSFGCNSTLIKHQRIHTGEKPYQCPECGKNFSRSSNLITHQKMHTGEKSYESSEYEESLGQNCNVIEECRIQLGEKPYRCCECGKSFGLSSHLIRHQRTHTGEKPYRCSECWKTFSQSSTLVIHQRTHTGEKPYKCPDCGESFSQSFNLIRHRRTHIGEKPYKCTSCEKCFSRSAYLSQHRKIHVEKPFESPDVGDFPHEWTWKNCSGEMPFISSFSVSNSSS

SEQ ID NO: 16263 - protein, 665 aa, Homo Sapiens
MFPVLEPHQVGLIRSYNSKTMTCFQELVTFRDVAIDFSRQEWEYLDPNQRDLYRDVMLENYRNLVSLGGHSISKPVVVDLLERGKEPWMILREETQFTDLDLQCEIISYIEVPTYETDISSTQLQSIYKREKLYECKKCQKKFSSGYQLILHHRFHVIERPYECKECGKNFRSGYQLTLHQRFHTGEKPYECTECGKNFRSGYQLTVHQRFHTGEKTYECRQCGKAFIYASHIVQHERIHTGGKPYECQECGRAFSQGGHLRIHQRVHTGEKPYKCKECGKTFSRRSNLVEHGQFHTDEKPYICEKCGKAFRRGHQLTVHQRVHTGKKPYECKECGKGYTTASYFLLHQRIHKGGKPYECKECKKTFTLYRNLTRHQNIHTGEKLFECKQCGKTYTTGSKLFQHQKTHTGEKPYECKECGKAFSLYGYLKQHQKIHTGMKHFECKECKKTFTLYRNLTRHQNIHTGKKLFECQECGKAYSTGSNLIQHRKTHTGEKPYKCKECGKTFSLHGYLNQHQKIHTGMKPYECKVCRKTFTFYRNLTLHQSIHTDEKPFECKECGKTFRRSSHLTAHQSIHADKKPYECKECGKAFKMYGYLTQHQKIHTGGKPYECKECGKAFSRASNLVQHERIHTGEKPYVCKQCGKTFRYGSALKAHQRIHRSIKV

SEQ ID NO: 16264 - protein, 896 aa, Homo Sapiens
MTEESEETVLYIEHRYVCSECNQLYGSLEEVLMHQNSHVPQQHFELVGVADPGVTVATDTASGTGLYQTLVQESQYQCLECGQLLMSPSQLLEHQELHLKMMAPQEAVPAEPSPKAPPLSSSTIHYECVDCKALFASQELWLNHRQTHLRATPTKAPAPVVLGSPVVLGPPVGQARVAVEHSYRKAEEGGEGATVPSAAATTTEVVTEVELLLYKCSECSQLFQLPADFLEHQATHFPAPVPESQEPALQQEVQASSPAEVPVSQPDPLPASDHSYELRNGEAIGRDRRGRRARRNNSGEAGGAATQELFCSACDQLFLSPHQLQQHLRSHREGVFKCPLCSRVFPSPSSLDQHLGDHSSESHFLCVDCGLAFGTEALLLAHRRAHTPNPLHSCPCGKTFVNLTKFLYHRRTHGVGGVPLPTTPVPPEEPVIGFPEPAPAETGEPEAPEPPVSEETSAGPAAPGTYRCLLCSREFGKALQLTRHQRFVHRLERRHKCSICGKMFKKKSHVRNHLRTHTGERPFPCPDCSKPFNSPANLARHRLTHTGERPYRCGDCGKAFTQSSTLRQHRLVHAQHFPYRCQECGVRFHRPYRLLMHRYHHTGEYPYKCRECPRSFLLRRLLEVHQLVVHAGRQPHRCPSCGAAFPSSLRLREHRCAAAAAQAPRRFECGTCGKKVGSAARLQAHEAAHAAAGPGEVLAKEPPAPRAPRATRAPVASPAALGSTATASPAAPARRRGLECSECKKLFSTETSLQVHRRIHTGERPYPCPDCGKAFRQSTHLKDHRRLHTGERPFACEVCGKAFAISMRLAEHRRIHTGERPYSCPDCGKSYRSFSNLWKHRKTHQQQHQAAVRQQLAEAEAAVGLAVMETAVEALPLVEAIEIYPLAEAEGVQISG

SEQ ID NO: 16265 - protein, 245 aa, Homo Sapiens
MLERGAESAAGATDPSPTGKEPVTKEAPHQGPPQKPSQSAPGPTASAGSPPRPRRRPPPQRPHRCPDCDKAFSYPSKLATHRLAHGGARPHPCPDCPKAFSYPSKLAAHRLTHSGARPHPCPHCPKSFGHRSKLAAHLWTHAPTRPYPCPDCPKSFCYPSKLAAHRHTHHATDARPYPCPHCPKAFSFPSKLAAHRLCHDPPTAPGSQATAWHRCSSCGQAFGQRRLLLLHQRSHHQVEHKGERD

SEQ ID NO: 16266 - protein, 715 aa, Homo Sapiens
MSSPKRSSKPSMSLAPSGSSMPTADPKPPASLKSTKSATPNRSLVPTKPATSRNSVMSPSSSKSTKSTSTKRAPSNRPSSRSRVRSKARTPSRVSTDTRTSKASKASDVRCHQRRGTHSRGRTPGRRGSRSSKRSPSRASTPGRIRTHGARPGMASRVRTPTSQQKGSRGKSYGRPRTSNRERSDSQPRNLSKKSYRPPGGSGIGRSSELAVTPSTAKCQTPTGIPSKEKSDNPSPSSSRKVKSYGQMIIPSREKSYSPTEMSSRVKSYNQASTRSRPQSHSQSRSPRRSRSGSQKRTHSRVRSHSWKRNHSRARSRTRKGILSQMGRHSQSRSHSKGKSQNQSRTPRRGRSHNWSRNPSKERSHSHSRSSSKERDHRGSSSPRKESGRSQSGSPNKQRDHSRSRSPNKARDRSRSRSPYKARDRSRSRSPNKARDCSRSRSPYKARDRSRSRSPNKARDHSRSRSPNKARDRSRSRSPSKERDHSQLGSPSKERDHRRSRSPSKERQCRQSRSSSKERDHRRSRSPSKERQRRQSRSPNKERDRSQSRSPSEEREHRQSRSPSKERDRRRWRSPSKERERRQSRSSSEERDHSRSRSPNKQSGYSRPRASSKEKAHSRSRTPSKEGNHSQSRTSSKESDPSQSTVPRSPDWKRSPTRTSSLSQNRTPSKTSSHSPSTFPSGGQTLSQDDSQADATTSKATLPGERSSSSSSKLA

SEQ ID NO: 16267 - protein, 170 aa, Homo Sapiens
MEDPNPEENMKQQDSPKERSPQSPGGNICHLGAPKCTRCLITFADSKFQERHMKREHPADFVAQKLQGVLFICFTCARSFPSSKALITHQRSHGPAAKPTLPVATTTAQPTFPCPDCGKTFGQAVSLRRHRQMHEVRAPPGTFACTECGQDFAQEAGLHQHYIRHARGEL

SEQ ID NO: 16268 - protein, 485 aa, Homo Sapiens
MKNATIVMSVRREQGSSSGEGSLSFEDVAVGFTREEWQFLDQSQKVLYKEVMLENYINLVSIGYRGTKPDSLFKLEQGEPPGIAEGAAHSQICPGFVIQSRRYAGKDSDAFGGYGRSCLHIKRDKTLTGVKYHRCVKPSSPKSQLNDLQKICAGGKPHECSVCGRAFSRKAQLIQHQRTERGEKPHGCGECGKTFMRKIQLTEHQRTHTGEKPHECSECGKAFSRKSQLMVHQRTHTGEKPYRCSKCGKAFSRKCRLNRHQRSHTGEKLYGCSVCGKAFSQKAYLTAHQRLHTGDKPYKCSDCGRTFYFKSDLTRHQRIHTGEKPYECSECEKAFRSKSKLIQHQRTHTGERPYSCRECGKAFAHMSVLIKHEKTHIRETAINSLTVEKPSSRSHTSLYMSELIQEQKTVNTVPIEMPSSGTPPLLNKSERLVGRNVVIVEQPFPRNQAFVVNQEFEQRISLTNEVNVAPSVINYILYLTDIVSE

SEQ ID NO: 16269 - protein, 590 aa, Homo Sapiens
MLHEEAAQKRKGKEPGMALPQGRLTFRDVAIEFSLAEWKFLNPAQRALYREVMLENYRNLEAVDISSKRMMKEVLSTGQGNTEVIHTGMLQRHESYHTGDFCFQEIEKDIHDFEFQSQKDERNGHEASMPKIKELMGSTDRHDQRHAGNKPIKDQLGLSFHLHLPELHIFQPEEKIANQVEKSVNDASSISTSQRISCRPETHTPNNYGNNFFHSSLLTQKQEVHMREKSFQCNETGEAFNCSSFVRKHQIIHLGEKQYKFDICGKVFNEKRYLARHRRCHTSEKPYKCNECGKSFSYKSSLTCHRRCHTGEKPYKCNECGKSFSYKSSLTCHHRCHTGEKPYKCNECGKSFSYKSSLRCHRRLHTGIKPYKCNECGKMFGQNSTLVIHKAIHTGEKPYKCNECGKAFNQQSHLSRHHRLHTGEKPYKCNDCGKAFIHQSSLARHHRLHTGEKSYKCEECDRVFSQKSNLERHKIIHTGEKPYKCNECHKTFSHRSSLPCHRRLHSGEKPYKCNECGKTFNVQSHLSRHHRLHTGEKPYKCKVCDKAFMCHSYLANHTRIHSGEKPYKCNECGKAHNHLIDSSIKPCMSS

SEQ ID NO: 16270 - protein, 562 aa, Homo Sapiens
MDPQPPPPAQGSPPHRGRGRGRGRGRGRGRGRGRGGAGAPRAPLPCPTCGRLFRFPYYLSRHRLSHSGLRPHACPLCPKAFRRPAHLSRHLRGHGPQPPLRCAACPRTFPEPAQLRRHLAQEHAGGEVELAIERVAKETAEPSWGPQDEGSEPPTTAAAGATEEEAVAAWPETWPAGEPSTLAAPTSAAEPRESESEEAEAGAAELRAELALAAGRQEEKQVLLQADWTLLCLRCREAFATKGELKAHPCLRPEGEQEGEGGPPPRPKRHQCSICLKAFARPWSLSRHRLVHSTDRPFVCPDCGLAFRLASYLRQHRRVHGPLSLLAPLPAAGKKDDKASGARNSAKGPEGGEGAECGGASEGGEGQNGGDAAPARPPAGEPRFWCPECGKGFRRRAHLRQHGVTHSGARPFQCVRCQREFKRLADLARHAQVHAGGPAPHPCPRCPRRFSRAYSLLRHQRCHRAELERAAALQALQAQAPTSPPPPPPPLKAEQEEEGLPLPLANIKEEPPSPGTPPQSPPAPPVFLSASCFDSQDHSAFEMEEEEVDSKAHLRGLGGLAS

SEQ ID NO: 16271 - protein, 172 aa, Homo Sapiens
MLLLPPRPPHPRSSSPEAMDPPPPKAPPFPKAEGPSSTPSSAAGPRPPRLGRHLLIDANGVPYTYTVQLEEEPRGPPQREAPPGEPGPRKGYSCPECARVFASPLRLQSHRVSHSDLKPFTCGACGKAFKRSSHLSRHRATHRARAGPPHTCPLCPRRFQDAAELAQHVRLH

SEQ ID NO: 16272 - protein, 197 aa, Homo Sapiens
MLVLPSPCPQPLAFSSVETMEGPPRRTCRSPEPGPSSSIGSPQASSPPRPNHYLLIDTQGVPYTVLVDEESQREPGASGAPGQKKCYSCPVCSRVFEYMSYLQRHSITHSEVKPFECDICGKAFKRASHLARHHSIHLAGGGRPHGCPLCPRRFRDAGELAQHSRVHSGERPFQCPHCPRRFMEQNTLQKHTRWKHP

SEQ ID NO: 16273 - protein, 517 aa, Homo Sapiens
MSLGSELFRDVAIVFSQEEWQWLAPAQRDLYRDVMLETYSNLVSLGLAVSKPDVISFLEQGKEPWMVERVVSGGLCPVLESRYDTKELFPKQHVYEVESPQWEIMESLTSYGLECSSFQDDWECRNQFDRQQGNPDRHFHQMIIRHEEMPTFDQHASLTFYQKIHTREKPFGYNKCRKDFWQKELLINHQGIYTNEKPYKCKECGKAFKYGSRLIQHENIHSGKKPYECKECGKAFNSGSNFIQHQRVHTGEKPYECKDCEKAFSRSSQLIEHQRTHTGEKPYQCKECGKAFNRISHLKVHYRIHTGEKPYACKECGKTFSHRSQLIQHQTVHTGRKLYECKECGKAFNQGSTLIRHQRIHTGEKPYECKVCGKAFRVSSQLKQHQRIHTGEKPYQCKVCGRAFKRVSHLTVHYRIHTGEKPYECKECGKAFSHCSQLIHHQVIHTEKKPYEYKECEKTLSHDSTTVQPQRMHNRETHVNIINVEKPSISSYPLLIIREFMLASNHMNGSNGESPLA

SEQ ID NO: 16274 - protein, 569 aa, Homo Sapiens
MSKDLVTFGDVAVNFSQEEWEWLNPAQRNLYRKVMLENYRSLVSLGVSVSKPDVISLLEQGKEPWMVKKEGTRGPCPDWEYVFKNSEFSSKQETYEESSKVVTVGARHLSYSLDYPSLREDCQSEDWYKNQLGSQEVHLSQLIITHKEILPEVQNKEYNKSWQTFHQDTIFDIQQSFPTKEKAHKHEPQKKSYRKKSVEMKHRKVYVEKKLLKCNDCEKVFNQSSSLTLHQRIHTGEKPYACVECGKTFSQSANLAQHKRIHTGEKPYECKECRKAFSQNAHLAQHQRVHTGEKPYQCKECKKAFSQIAHLTQHQRVHTGERPFECIECGKAFSNGSFLAQHQRIHTGEKPYVCNVCGKAFSHRGYLIVHQRIHTGERPYECKECRKAFSQYAHLAQHQRVHTGEKPYECKVCRKAFSQIAYLDQHQRVHTGEKPYECIECGKAFSNSSSLAQHQRSHTGEKPYMCKECRKTFSQNAGLAQHQRIHTGEKPYECNVCGKAFSYSGSLTLHQRIHTGERPYECKDCRKSFRQRAHLAHHERIHTMESFLTLSSPSPSTSNQLPRPVGFIS

SEQ ID NO: 16275 - protein, 421 aa, Homo Sapiens
MAGEAEAQLDPSLQGLVMFEDVTVYFSREEWGLLNVTQKGLYRDVMLENFALVSSLGLAPSRSPVFTQLEDDEQSWVPSWVDVTPVSRAEARRGFGLDGLCRVEDERAHPEHLKSYRVIQHQDTHSEGKPRRHTEHGAAFPPGSSCGQQQEVHVAEKLFKCSDCGKVFLKAFALLDHLITHSEERPFRCPTGRSAFKKSAHINPRKIHTGETAHVCNECGKAFSYPSKLRKHQKVHTGIKPFKCSDCGKTFNRKDALVLHQRIHTGERPYECSKCGKTFSVLSTLIRHRKVHIGERPYECTECGKFFKYNNSFILHQRVHTGERPFECKQCGKGYVTRSGLYQHWKVHTGERPYECSLCGKTFTTRSYRNRHQQFHTEERSYECTECGKAFKHSSTLLQHKKVHTPERRQEDRAHGKVVSC

SEQ ID NO: 16276 - protein, 769 aa, Homo Sapiens
MPANWTSPQKSSALAPEDHGSSYEGSVSFRDVAIDFSREEWRHLDPSQRNLYRDVMLETYSHLLSVGYQVPEAEVVMLEQGKEPWALQGERPRQSCPGEKLWDHNQCRKILSYKQVSSQPQKMYPGEKAYECAKFEKIFTQKSQLKVHLKVLAGEKLYVCIECGKAFVQKPEFIIHQKTHMREKPFKCNECGKSFFQVSSLFRHQRIHTGEKLYECSQCGKGFSYNSDLSIHEKIHTGERHHECTDCGKAFTQKSTLKMHQKIHTGERSYICIECGQAFIQKTHLIAHRRIHTGEKPYECSNCGKSFISKSQLQVHQRVHTRVKPYICTEYGKVFSNNSNLVTHKKVQSREKSSICTECGKAFTYRSELIIHQRIHTGEKPYECSDCGKAFTQKSALTVHQRIHTGEKSYICMKCGLAFIQKAHLIAHQIIHTGEKPHKCGHCGKLFTSKSQLHVHKRIHTGEKPYMCNKCGKAFTNRSNLITHQKTHTGEKSYICSKCGKAFTQRSDLITHQRIHTGEKPYECNTCGKAFTQKSHLNIHQKIHTGERQYECHECGKAFNQKSILIVHQKIHTGEKPYVCTECGRAFIRKSNFITHQRIHTGEKPYECSDCGKSFTSKSQLLVHQPVHTGEKPYVCAECGKAFSGRSNLSKHQKTHTGEKPYICSECGKTFRQKSELITHHRIHTGEKPYECSDCGKSFTKKSQLQVHQRIHTGEKPYVCAECGKAFTDRSNLNKHQTTHTGDKPYKCGICGKGFVQKSVFSVHQSSHA

SEQ ID NO: 16277 - protein, 769 aa, Homo Sapiens
MPASWTSPQKSSALAPEDHGSSYEGSVSFRDVAIDFSREEWRHLDLSQRNLYRDVMLETYSHLLSVGYQVPKPEVVMLEQGKEPWALQGERPRHSCPGEKLWDHNQHRKIIGYKPASSQDQKIYSGEKSYECAEFGKSFTWKSQFKVHLKVPTGEKLYVCIECGRAFVQKPEFITHQKTHMREKPYKCNECGKSFFQVSSLFRHHRIHTGEKLYECSECGKGFPYNSDLSIHEKIHTGERHHECTDCGKAFTQKSTLKIHQKIHTGERSYICIECGQAFIQKTQLIAHRRIHSGEKPYECNNCGKSFISKSQLQVHQRVHTRVKPYICTEYGKVFSNNSNLITHEKIQSREKSSICTECGKAFTYRSELIIHQRIHTGEKPYECSDCGRAFTQKSALTVHQRIHTGEKSYICMKCGLAFIRKAHLITHQIIHTGEKPYKCGHCGKLFTSKSQLHVHKRIHTGEKPYVCNKCGKAFTNRSNLITHQKTHTGEKSYICSKCGKAFTQRSDLITHQRIHTGEKPYECNTCGKAFTQKSNLNIHQKIHTGERQYECHECGKAFNQKSILIVHQKIHTGEKPYVCTECGRAFIRKSNFITHQRIHTGEKPYECSDCGKSFTSKSQLLVHQPVHTGEKPYVCAECGKAFSGRSNLSKHQKTHTGEKPYICSECGKTFRQKSELITHHRIHTGEKPYECSDCGKSFTKKSQLQVHQRIHTGEKPYVCAECGKAFSNRSNLNKHQTTHTGDKPYKCGICGKGFVQKSVFSVHQSSHA

SEQ ID NO: 16278 - protein, 402 aa, Homo Sapiens
MAAAAALRAPAQSSVTFEDVAVNFSLEEWSLLNEAQRCLYRDVMLETLTLISSLGCWHGGEDEAAPSKQSTCIHIYKDQGGHSGERPYECGEYRKLFKNKSCLTEPRRDHKHRNVRTGERPYECSKYGKLFHQKPTLHIHERFHTGQKTYECSECGKSFHQSSSLLQRQTLHTRERPYECIECGKAFAEKSSLINHRKVHSGAKRYECNECGKSFAYTSSLIKHRRIHTGERPYECSECGRSFAENSSLIKHLRVHTGERPYECVECGKSFRRSSSLLQHQRVHTRERPYECSECGKSFSLRSNLIHHQRVHTGERHECGQCGKSFSRKSSLIIHLRVHTGERPYECSDCGKSFAENSSLIKHLRVHTGERPYECIDCGKSFRHSSSFRRHQRVHTGMRPYK

SEQ ID NO: 16279 - protein, 575 aa, Homo Sapiens
MAAAVPRRPTQQGTVTFEDVAVNFSQEEWCLLSEAQRCLYRDVMLENLALISSLGCWCGSKDEEAPCKQRISVQRESQSRTPRAGVSPKKAHPCEMCGLILEDVFHFADHQETHHKQKLNRSGACGKNLDDTAYLHQHQKQHIGEKFYRKSVREASFVKKRKLRVSQEPFVFREFGKDVLPSSGLCQEEAAVEKTDSETMHGPPFQEGKTNYSCGKRTKAFSTKHSVIPHQKLFTRDGCYVCSDCGKSFSRYVSFSNHQRDHTAKGPYDCGECGKSYSRKSSLIQHQRVHTGQTAYPCEECGKSFSQKGSLISHQLVHTGEGPYECRECGKSFGQKGNLIQHQQGHTGERAYHCGECGKSFRQKFCFINHQRVHTGERPYKCGECGKSFGQKGNLVHHQRGHTGERPYECKECGKSFRYRSHLTEHQRLHTGERPYNCRECGKLFNRKYHLLVHERVHTGERPYACEVCGKLFGNKHSVTIHQRIHTGERPYECSECGKSFLSSSALHVHKRVHSGQKPYKCSECGKSFSECSSLIKHRRIHTGERPYECTKCGKTFQRSSTLLHHQSSHRRKAL

SEQ ID NO: 16280 - protein, 364 aa, Homo Sapiens
MWAPREQLLGWTAEALPAKDSAWPWEEKPRYLGPVTFEDVAVLFTEAEWKRLSLEQRNLYKEVMLENLRNLVSLAESKPEVHTCPSCPLAFGSQQFLSQDELHNHPIPGFHAGNQLHPGNPCPEDQPQSQHPSDKNHRGAEAEDQRVEGGVRPLFWSTNERGALVGFSSLFQRPPISSWGGNRILEIQLSPAQNASSEEVDRISKRAETPGFGAVTFGECALAFNQKSNLFRQKAVTAEKSSDKRQSQVCRECGRGFSRKSQLIIHQRTHTGEKPYVCGECGRGFIVESVLRNHLSTHSGEKPYVCSHCGRGFSCKPYLIRHQRTHTREKSFMCTVCGRGFREKSELIKHQRIHTGDKPYVCRD

SEQ ID NO: 16281 - protein, 1267 aa, Homo Sapiens
MGDMKTPDFDDLLAAFDIPDPTSLDAKEAIQTPSEENESPLKPPGICMDESVSLSHSGSAPDVPAVSVIVKNTSRQESFEAEKDHITPSLLHNGFRGSDLPPDPHNCGKFDSTFMNGDSARSFPGKLEPPKSEPLPTFNQFSPISSPEPEDPIKDNGFGIKPKHSDSYFPPPLGCGAVGGPVLEALAKFPVPELHMFDHFCKKEPKPEPLPLGSQQEHEQSGQNTVEPHKDPDATRFFGEALEFNSHPSNSIGESKGLARELGTCSSVPPRQRLKPAHSKLSSCVAALVALQAKRVASVTKEDQPGHTKDLSGPTKESSKGSPKMPKSPKSPRSPLEATRKSIKPSDSPRSICSDSSSKGSPSVAASSPPAIPKVRIKTIKTSSGEIKRTVTRILPDPDDPSKSPVGSPLGSAIAEAPSEMPGDEVPVEEHFPEAGTNSGSPQGARKGDESMTKASDSSSPSCSSGPRVPKGAAPGSQTGKKQQSTALQASTLAPANLLPKAVHLANLNLVPHSVAASVTAKSSVQRRSQPQLTQMSVPLVHQVKKAAPLIVEVFNKVLHSSNPVPLYAPNLSPPADSRIHVPASGYCCLECGDAFALEKSLSQHYGRRSVHIEVLCTLCSKTLLFFNKCSLLRHARDHKSKGLVMQCSQLLVKPISADQMFVSAPVNSTAPAAPAPSSSPKHGLTSGSASPPPPALPLYPDPVRLIRYSIKCLECHKQMRDYMVLAAHFQRTTEETEGLTCQVCQMLLPNQCSFCAHQRIHAHKSPYCCPECGVLCRSAYFQTHVKENCLHYARKVGYRCIHCGVVHLTLALLKSHIQERHCQVFHKCAFCPMAFKTASSTADHSATQHPTQPHRPSQLIYKCSCEMVFNKKRHIQQHFYQNVSKTQVGVFKCPECPLLFVQKPELMQHVKSTHGVPRNVDELSSLQSSADTSSSRPGSRVPTEPPATSVAARSSSLPSGRWGRPEAHRRVEARPRLRNTGWTCQECQEWVPDRESYVSHMKKSHGRTLKRYPCRQCEQSFHTPNSLRKHIRNNHDTVKKFYTCGYCTEDSPSFPRPSLLESHISLMHGIRNPDLSQTSKVKPPGGHSPQVNHLKRPVSGVGDAPGTSNGATVSSTKRHKSLFQCAKCSFATDSGLEFQSHIPQHQVDSSTAQCLLCGLCYTSASSLSRHLFIVHKVRDQEEEEEEEAAAAEMAVEVAEPEEGSGEEVPMETRENGLEECAGEPLSADPEARRLLGPAPEDDGGHNDHSQPQASQDQDSHTLSPQV

SEQ ID NO: 16282 - protein, 134 aa, Homo Sapiens
MGRSRRTGAHRAHSLARQMKAKRRRPDLDEIHRELRPQGSARPQPDPNAEFDPDLPGGGLHRCLACARYFIDSTNLKTHFRSKDHKKRLKQLSVEPYSQEEAERAAGMGSYVPPRRLAVPTEVSTEVPEMDTST

SEQ ID NO: 16283 - protein, 807 aa, Homo Sapiens
MKEWKSKMEISEEKKSARAASEKLQRQITQECELVETSNSEDRLLKHWVSPLKDAMRHLPSQESGIREMHIIPQKAIVGEIGHGCNEGEKILSAGESSHRYEVSGQNFKQKSGLTEHQKIHNINKTYECKECEKTFNRSSNLIIHQRIHTGNKPYVCNECGKDSNQSSNLIIHQRIHTGKKPYICHECGKDFNQSSNLVRHKQIHSGGNPYECKECGKAFKGSSNLVLHQRIHSRGKPYLCNKCGKAFSQSTDLIIHHRIHTGEKPYECYDCGQMFSQSSHLVPHQRIHTGEKPLKCNECEKAFRQHSHLTEHQRLHSGEKPYECHRCGKTFSGRTAFLKHQRLHAGEKIEECEKTFSKDEELREEQRIHQEEKAYWCNQCGRNFQGTSDLIRHQVTHTGEKPYECKECGKTFNQSSDLLRHHRIHSGEKPCVCSKCGKSFRGSSDLIRHHRVHTGEKPYECSECGKAFSQRSHLVTHQKIHTGEKPYQCTECGKAFRRRSLLIQHRRIHSGEKPYECKECGKLFIWRTAFLKHQSLHTGEKLECEKTFSQDEELRGEQKIHQEAKAYWCNQCGRAFQGSSDLIRHQVTHTREKPYECKECGKTFNQSSDLLRHHRIHSGEKPYVCNKCGKSFRGSSDLIKHHRIHTGEKPYECSECGKAFSQRSHLATHQKIHTGEKPYQCSECGNAFRRRSLLIQHRRLHSGEKPYECKECGKLFMWHTAFLKHQRLHAGEKLEECEKTFSKDEELRKEQRTHQEKKVYWCNQCSRTFQGSSDLIRHQVTHTREKPYECKECGKTQSELRPSETS

SEQ ID NO: 16284 - protein, 648 aa, Homo Sapiens
MELVTFRDVAIEFSPEEWKCLDPAQQNLYRDVMLENYRNLVSLGFVISNPDLVTCLEQIKEPCNLKIHETAAKPPAICSPFSQDLSPVQGIEDSFHKLILKRYEKCGHENLQLRKGCKRVNECKVQKGVNNGVYQCLSTTQSKIFQCNTCVKVFSKFSNSNKHKIRHTGEKPFKCTECGRSFYMSHLTQHTGIHAGEKPYKCEKCGKAFNRSTSLSKHKRIHTGEKPYTCEECGKAFRRSTVLNEHKKIHTGEKPYKCEECGKAFTRSTTLNEHKKIHTGEKPYKCKECGKAFRWSTSLNEHKNIHTGEKPYKCKECGKAFRQSRSLNEHKNIHTGEKPYTCEKCGKAFNQSSSLIIHRSIHSEQKLYKCEECGKAFTWSSSLNKHKRIHTGEKPYTCEECGKAFYRSSHLAKHKRIHTGEKPYTCEECGKAFNQSSTLILHKRIHSGQKPYKCEECGKAFTRSTTLNEHKKIHTGEKPYKCEECGKAFIWSASLNEHKNIHTGEKPYKCKECGKAFNQSSGLIIHRSIHSEQKLYKCEECGKAFTRSTALNEHKKIHSGEKPYKCKECGKAYNLSSTLTKHKRIHTGEKPFTCEECGKAFNWSSSLTKHKIIHTGEKSYKCEECGKAFNRPSTLTVHKRIHTGKEHS

SEQ ID NO: 16285 - protein, 504 aa, Homo Sapiens
MPSPDSMTFEDIIVDFTQEEWALLDTSQRKLFQDVMLENISHLVSIGKQLCKSVVLSQLEQVEKLSTQRISLLQGREVGIKHQEIPFIQHIYQKGTSTISTMRSHTQEDPFLCNDLGEDFTQHIALTQNVITYMRTKHFVSKKFGKIFSDWLSFNQHKEIHTKCKSYGSHLFDYAFIQNSALRPHSVTHTREITLECRVCGKTFSKNSNLRRHEMIHTGEKPHGCHLCGKAFTHCSDLRKHERTHTGEKPYGCHLCGKAFSKSSNLRRHEMIHTREKAQICHLCGKAFTHCSDLRKHERTHLGDKPYGCLLCGKAFSKCSYLRQHERTHNGEKPYECHLCGKAFSHCSHLRQHERSHNGEKPHGCHLCGKAFTESSVLKRHERIHTGEKPYECHVCGKAFTESSDLRRHERTHTGEKPYECHLCGKAFNHSSVLRRHERTHTGEKPYECNICGKAFNRSYNFRLHRRVHTGEKPYVCPLCGKAFSKFFNLRQHERTHTKKAMNM

SEQ ID NO: 16286 - protein, 424 aa, Homo Sapiens
MASMPPTPEAQGPILFEDLAVYFSQEECVTLHPAQRSLSKDGTKESLEDAALMGEEGKPEINQQLSLESMELDELALEKYPIAAPLVPYPEKSSEDGVGNPEAKILSGTPTYKRRVISLLVTIENHTPLVELSEYLGTNTLSEILDSPWEGAKNVYKCPECDQNFSDHSYLVLHQKIHSGEKKHKCGDCGKIFNHRANLRTHRRIHTGEKPYKCAKCSASFRQHSHLSRHMNSHVKEKPYTCSICGRGFMWLPGLAQHQKSHSAENTYESTNCDKHFNEKPNLALPEETFVSGPQYQHTKCMKSFRQSLYPALSEKSHDEDSERCSDDGDNFFSFSKFKPLQCPDCDMTFPCFSELISHQNIHTEERPHKCKTCEESFALDSELACHQKSHMLAEPFKCTVCGKTFKSNLHLITHKRTHIKNTT

SEQ ID NO: 16287 - protein, 904 aa, Homo Sapiens
MAAAGGAEGRRAALEAAAAAAPERGGGSCVLCCGDLEATALGRCDHPVCYRCSTKMRVLCEQRYCAVCREELRQVVFGKKLPAFATIPIHQLQHEKKYDIYFADGKVYALYRQLLQHECPRCPELPPFSLFGDLEQHMRRQHELFCCRLCLQHLQIFTYERKWYSRKDLARHRMQGDPDDTSHRGHPLCKFCDERYLDNDELLKHLRRDHYFCHFCDSDGAQDYYSDYAYLREHFREKHFLCEEGRCSTEQFTHAFRTEIDLKAHRTACHSRSRAEARQNRHIDLQFSYAPRHSRRNEGVVGGEDYEEVDRYSRQGRVARAGTRGAQQSRRGSWRYKREEEDREVAAAVRASVAAQQQEEARRSEDQEEGGRPKKEEAAARGPEDPRGPRRSPRTQGEGPGPKETSTNGPVSQEAFSVTGPAAPGCVGVPGALPPPSPKLKDEDFPSLSASTSSSCSTAATPGPVGLALPYAIPARGRSAFQEEDFPALVSSVPKPGTAPTSLVSAWNSSSSSKKVAQPPLSAQATGSGQPTRKAGKGSRGGRKGGPPFTQEEEEDGGPALQELLSTRPTGSVSSTLGLASIQPSKVGKKKKVGSEKPGTTLPQPPPATCPPGALQAPEAPASRAEGPVAVVVNGHTEGPAPARSAPKEPPGLPRPLGSFPCPTPQEDFPALGGPCPPRMPPPPGFSAVVLLKGTPPPPPPGLVPPISKPPPGFSGLLPSPHPACVPSPATTTTTKAPRLLPAPRAYLVPENFRERNLQLIQSIRDFLQSDEARFSEFKSHSGEFRQGLISAAQYYKSCRDLLGENFQKVFNELLVLLPDTAKQQELLSAHTDFCNREKPLSTKSKKNKKSAWQATTQQAGLDCRVCPTCQQVLAHGDASSHQALHAARDDDFPSLQAIARIIT

SEQ ID NO: 16288 - protein, 588 aa, Homo Sapiens
MAAPALALVSFEDVVVTFTGEEWGHLDLAQRTLYQEVMLETCRLLVSLGHPVPKPELIYLLEHGQELWTVKRGLSQSTCAGEKAKPKITEPTASQLAFSEESSFQELLAQRSSRDSRLGQARDEEKLIKIQEGNLRPGTNPHKEICPEKLSYKHDDLEPDDSLGLRVLQERVTPQDALHECDSQGPGKDPMTDARNNPYTCTECGKGFSKKWALVRHQQIHAGVKPYECNECGKACRYMADVIRHMRLHTGEKPYKCIECGKAFKRRFHLTEHQRIHTGDKPYECKECGKAFTHRSSFIQHNMTHTREKPFLCKECGKAFYYSSSFAQHMRIHTGKKLYECGECGKAFTHRSTFIQHNVTHTGEKPFLCKECGKTFCLNSSFTQHMRIHTGEKPYECGECGKAFTHRSTFIRHKRTHTGEKPFECKECGKAFCDSSSLIQHMRIHTGEKPYECSECGKAFTHHSVFIRHNRTHSGQKPLECKECAKAFYYSSSFTRHMRIHTGEKPYVCRECGKAFTQPANFVRHNRIHTGEKPFECKECEKAFCDNFALTQHMRTHTGEKPFECNECGKTFSHSSSFTHHRKIHTRV

SEQ ID NO: 16289 - protein, 722 aa, Homo Sapiens
MMKEVLSTGQGNTEVIHTGTLQRYQSYHIGDFCFQEIEKEIHDIEFQCQEDERNGHEAPMTKIKKLTGSTDQHDHRHAGNKPIKDQLGSSFYSHLPELHIIQIKGKIGNQFEKSTSDAPSVSTSQRISPRPQIHISNNYGNNSPNSSLLPQKQEVYMREKSFQCNESGKAFNCSSLLRKHQIPHLGDKQYKCDVCGKLFNHKQYLTCHCRCHTGEKPYKCNECGKSFSQVSSLTCHRRLHTAVKSHKCNECGKIFGQNSALVIHKAIHTGEKPYKCNECDKAFNQQSNLARHRRIHTGEKPYKCEECDKVFSRKSTLESHKRIHTGEKPYKCKVCDTAFTWNSQLARHKRIHTGEKTYKCNECGKTFSHKSSLVCHHRLHGGEKSYKCKVCDKAFAWNSHLVRHTRIHSGGKPYKCNECGKTFGQNSDLLIHKSIHTGEQPYKYEECEKVFSCGSTLETHKIIHTGEKPYKCKVCDKAFACHSYLAKHTRIHSGEKPYKCNECSKTFRLRSYLASHRRVHSGEKPYKCNECSKTFSQRSYLHCHRRLHSGEKPYKCNECGKTFSHKPSLVHHRRLHTGEKSYKCTVCDKAFVRNSYLARHTRIHTAEKPYKCNECGKAFNQQSQLSLHHRIHAGEKLYKCETCDKVFSRKSHLKRHRRIHPGKKPYKCKVCDKTFGSDSHLKQHTGLHTGEKPYKCNECGKAFSKQSTLIHHQAVHGVGKLD

SEQ ID NO: 16290 - protein, 641 aa, Homo Sapiens
MIQSQISFEDVAVDFTLEEWQLLNPTQKNLYRDVMLENYSNLVFLEVWLDNPKMWLRDNQDNLKSMERGHKYDVFGKIFNSSINIVHVGLRSHKCGTGEKSLKCPFDLLIPKNNCERKKIDELNKKLLFCIKPGRTHGGIKYCDCSTCRKSSNEEPWLTANHITHTGVYLCMECGRFFNKKSQLVIHQRTHTGEKPYQCSECGKAFSQKSLLTVHQRTHSGEKPHGCSECQKAFSRKSLLILHQRIHTGEKPYGCSECGKAFSRKSQLKRHQITHTIEKPYSCSECGKAFSQKLKLITHQRAHTGEKPYPCSHCGKAFFWKSQLITHQRTHTGKKPYGCGECQKAFSRNSLLIRHQRIHTGEKPYECNECGEAFIRKPQLIKHQITHTGEKNYRCSDCEEAFFKKSELIRHQKIHLGEKPYGCIQCGKTFFGKSQLLTHHRTHTGEKPYECSECGKAFTQKSSLISHQRTHTGEKPYECSECRKTFSEKSSLIHHQRTHTGEKPFECSECRKAFAWKPQLLRHQRIHTGEKPYECSECGKAFVQKVQLIKHQRNHTGEKTYGCSDCAKAFFEKAQLIIHQRIHTGERPYKCGECGKSFTRKSHLMRHQRIHTGDKYYGCNECGTTFNRKSQLMIHQRNHII

SEQ ID NO: 16291 - protein, 792 aa, Homo Sapiens
MAAINPWASWGALTDQSWGMTAVDPWASWALCPQYPAWHVEGSLEEGRRATGLPAAQVQEPVTFKDVAVDFTQEEWGQLDLVQRTLYRDVMLETYGHLLSVGNQIAKPEVISLLEQGEEPWSVEQACPQRTCPEWVRNLESKALIPAQSIFEEEQSHGMKLERYIWDDPWFSRLEVLGCKDQLEMYHMNQSTAMRQMVFMQKQVLSQRSSEFCGLGAEFSQNLNFVPSQRVSQIEHFYKPDTHAQSWRCDSAIMYADKVTCENNDYDKTVYQSIQPIYPARIQTGDNLFKCTDAVKSFNHIIHFGDHKGIHTGEKLYEYKECHQIFNQSPSFNEHPRLHVGENQYNYKEYENIFYFSSFMEHQKIGTVEKAYKYNEWEKVFGYDSFLTQHTSTYTAEKPYDYNECGTSFIWSSYLIQHKKTHTGEKPYECDKCGKVFRNRSALTKHERTHTGIKPYECNKCGKAFSWNSHLIVHKRIHTGEKPYVCNECGKSFNWNSHLIGHQRTHTGEKPFECTECGKSFSWSSHLIAHMRMHTGEKPFKCDECEKAFRDYSALSKHERTHSGAKPYKCTECGKSFSWSSHLIAHQRTHTGEKPYNCQECGKAFRERSALTKHEIIHSGIKPYECNKCGKSCSQMAHLVRHQRTHTGEKPYECNKCGKSFSQSCHLVAHRRIHTGEKPYKCNQCERSFNCSSHLIAHRRTHTGEKPYRCNECGKAFNESSSLIVHLRNHTGEKPYKCNHCEKAFCKNSSLIIHQRMHSGEKRFICSECGKAFSGHSALLQHQRNHSEEKLN

SEQ ID NO: 16292 - protein, 696 aa, Homo Sapiens
MSYGSITFGDVAIDFSHQEWEYLSLVQKTLYQEVMMENYDNLVSLAGHSVSKPDLITLLEQGKEPWMIVREETRGECTDLDSRCEIISDGKMQLYRKHSCVTLHQRIHNGQKPYECKQCQKSFSHLTELMVHQTIHTSEEPDQCEKFRKAFSHLTDLRKHQKINAREKPYECEECGKVFSYPANLAQHGKVHVEKPYECKECGEAFRTSRQLTVHHRFHYGEKPYECKECGKAFSVYGRLSRHQSIHTGEKPFECNKCGKSFRLKAGLKVHQSIHTGEKPHECKECGKAFRQFSHLVGHKRIHTGEKPYECKECGKGFTCRYQLTMHQRIYSGEKHYECKENGEAFSSGHQLTAPHTFESVEKPYKCEECGKAFSVHGRLTRHQGIHSGKKPYECNKCGKSFRLNSSLKIHQNIHTGEKPYKCKECGKAFSQRAHLAHHNRIHTGYKPFECKECGKSFRCASYLVIHERIHTGEKPYVCQECGKGFSYSHKLTIHRRVHTGEKPYECKECGKAFSVSGQLTQHLSIHSGKKPFECNKCGKSFRFISVLKAHQNIHSAEKPYECKECGKAFRHATSLIYHDRTHAGEKSYECKECGETFSHASHLIIHERIHTSDKPYECKRCGKAFHCASYLVRHESVHADGNPYMCEECGKAFNSSHELSIHHRVHTGEKPFKCNKCRRSFRLRSILEVHQRIHI

SEQ ID NO: 16293 - protein, 1512 aa, Homo Sapiens
MSVNISTAGKGVDPNTVDTYDSGDDWEIGVGNLIIDLDADLEKDRQKFEMNNSTTTTSSSNSKDCGGPASSGAGATAALADGLKFASVQASAPQGNSHKETSKSKVKRSKTSKDANKSLPSAALYGIPEISSTGKRQEVQGRPGEATGMNSALGQSVSSGGSGNPNSNSTSTSTSAATAGAGSCGKSKEEKPGKSQSSRGAKRDKDAGKSRKDKHDLLQGHQNGSGSQAPSGGHLYGFGAKSNGGGASPFHCGGTGSGSVAAAGEVSKSAPDSGLMGNSMLVKKEEEEEESHRRIKKLKTEKVDPLFTVPAPPPPISSSLTPQILPSYFSPSSSNIAAPVEQLLVRTRSVGVNTCEVGVVTEPECLGPCEPGTSVNLEGIVWHETEEGVLVVNVTWRNKTYVGTLLDCTKHDWAPPRFCESPTSDLEMRGGRGRGKRARSAAAAPGSEASFTESRGLQNKNRGGANGKGRRGSLNASGRRTPPNCAAEDIKASPSSTNKRKNKPPMELDLNSSSEDNKPGKRVRTNSRSTPTTPQGKPETTFLDQGCSSPVLIDCPHPNCNKKYKHINGLRYHQAHAHLDPENKLEFEPDSEDKISDCEEGLSNVALECSEPSTSVSAYDQLKAPASPGAGNPPGTPKGKRELMSNGPGSIIGAKAGKNSGKKKGLNNELNNLPVISNMTAALDSCSAADGSLAAEMPKLEAEGLIDKKNLGDKEKGKKATNCKTDKNLSKLKSARPIAPAPAPTPPQLIAIPTATFTTTTTGTIPGLPSLTTTVVQATPKSPPLKPIQPKPTIMGEPITVNPALVSLKDKKKKEKRKLKDKEGKETGSPKMDAKLGKLEDSKGASKDLPGHFLKDHLNKNEGLANGLSESQESRMASIKAEADKVYTFTDNAPSPSIGSASRLECSTLVNGQAPMAPLHVLTQNGAESSAAKTSSPAYSDISDAADDGGSDSRSEGMRSKASSPSDIISSKDSVVKGHSSTTAQSSQLKESHSPYYHSYDPYYSPSYMHPGQVGAPAAGNSGSTQGMKIKKESEEDAEKKDKAEQLDSKKVDHNSASLQPQHQSVITQRHPALAQSLYYGQYAYGLYMDQKSLMATSPAYRQQYEKYYEDQRLAEQKMAQTGRGDCERKSELPLKELGKEETKQKNMPSATISKAPSTPEPNKNHSKLGPSVPNKTEETGKSQLLSNHQQQLQADSFKAKQMENHQLIKEAVEMKSVMDSMKQTGVDPTSRFKQDPDSRTWHHYVYQPKYLDQQKSEELDREKKLKEDSPRKTPNKESGVPSLPVSLTSIKEEPKEAKHPDSQSMEESKLKNDDRKTPVNWKDSRGTRVAVSSPMSQHQSYIQYLHAYPYPQMYDPSHPAYRAVSPVLMHSYPGAYLSPGFHYPVYGKMSGREETEKVNTSPSVNTKTTTESKALDLLQQHANQYRSKSPAPVEKATAEREREAERERDRHSPFGQRHLHTHHHTHVGMGYPLIPGQYDPFQGLTSAALVASQQVAAQASASGMFPGQRRE

SEQ ID NO: 16294 - protein, 1411 aa, Homo Sapiens
MSLSSGASGGKGVDANPVETYDSGDEWDIGVGNLIIDLDADLEKDQQKLEMSGSKEVGIPAPNAVATLPDNIKFVTPVPGPQGKEGKSKSKRSKSGKDTSKPTPGTSLFTPSEGAASKKEVQGRSGDGANAGGLVAAIAPKGSEKAAKASRSVAGSKKEKENSSSKSKKERSEGVGTCSEKDPGVLQPVPLGGRGGQYDGSAGVDTGAVEPLGSIAIEPGAALNPLGTKPEPEEGENECRLLKKVKSEKMESPVSTPAVLPIHLLVPVVNNDISSPCEQIMVRTRSVGVNTCDVALATEPECLGPCEPGTSVNLEGIVWQETEDGMLVVNVTWRNKTYVGTLLDCTRHDWAPPRFCDSPTSDLEMRNGRGRGKRMRPNSNTPVNETATASDSKGTSNSSKTRAGANSKGRRGSQNSSEHRPPASSTSEDVKASPSSANKRKNKPLSDMELNSSSEDSKGSKRVRTNSMGSATGPLPGTKVEPTVLDRNCPSPVLIDCPHPNCNKKYKHINGLKYHQAHAHTDDDSKPEADGDSEYGEEPILHADLGSCNGASVSQKGSLSPARSATPKVRLVEPHSPSPSSKFSTKGLCKKKLSGEGDTDLGALSNDGSDDGPSVMDETSNDAFDSLERKCMEKEKCKKPSSLKPEKIPSKSLKSARPIAPAIPPQQIYTFQTATFTAASPGSSSGLTATVAQAMPNSPQLKPIQPKPTVMGEPFTVNPALTPAKDKKKKDKKKKESSKELESPLTPGKVCRAEEGKSPFRESSGDGMKMEGLLNGSSDPHQSRLASIKAEADKIYSFTDNAPSPSIGGSSRLENTTPTQPLTPLHVVTQNGAEASSVKTNSPAYSDISDAGEDGEGKVDSVKSKDAEQLVKEGAKKTLFPPQPQSKDSPYYQGFESYYSPSYAQSSPGALNPSSQAGVESQALKTKRDEEPESIEGKVKNDICEEKKPELSSSSQQPSVIQQRPNMYMQSLYYNQYAYVPPYGYSDQSYHTHLLSTNTAYRQQYEEQQKRQSLEQQQRGVDKKAEMGLKEREAALKEEWKQKPSIPPTLTKAPSLTDLVKSGPGKAKEPGADPAKSVIIPKLDDSSKLPGQAPEGLKVKLSDASHLSKEASEAKTGAECGRQAEMDPILWYRQEAEPRMWTYVYPAKYSDIKSEDERWKEERDRKLKEERSRSKDSVPKEDGKESTSSDCKLPTSEESRLGSKEPRPSVHVPVSSPLTQHQSYIPYMHGYSYSQSYDPNHPSYRSMPAVMMQNYPGSYLPSSYSFSPYGSKVSGGEDADKARASPSVTCKSSSESKALDILQQHASHYKSKSPTISDKTSQERDRGGCGVVGGGGSCSSVGGASGGERSVDRPRTSPSQRLMSTHHHHHHLGYSLLPAQYNLPYAAGLSSTAIVASQQGSTPSLYPPPRR

SEQ ID NO: 16295 - protein, 462 aa, Homo Sapiens
MLCDEEAQKRKAKESGMALPQGRLTFMDVAIEFSQEEWKSLDPGQRALYRDVMLENYRNLVFLGICLPDLSIISMLKQRREPLILQSQVKIVKNTDGRECVRSVNTGRSCVLGSNAENKPIKNQLGLTLEAHLSELQLFQAGRKIYRSNQVEKFTNHRSSVSPLQKISSSFTTHIFNKYRNDLIDFPLLPQEEKAYIRGKSYEYECSEDGEVFRVRASLTNHQVIHTAEKPYKCTECGKVFSRNSHLVEHWRIHTGQKPYKCSECDKVFNRNSNLARHQRIHTGEKPHKCNECGKAFRECSGLTTHLVIHTGEKPYKCNECGKNFRHKFSLTNHQRSHTAEKPYKCNECGKVFSLLSYLARHQIIHSTEKPYKCNECGRAFHKRPGLMAHLLIHTGEKPYKCNECDKVFGRKLYLTNHQRIHTGERPYKCNACGKVFNQNPHLSRHRKIHAGENSLRTLQME

SEQ ID NO: 16296 - protein, 705 aa, Homo Sapiens
MLREEAAQKRKGKEPGMALPQGRLTFRDVAIEFSLAEWKCLNPSQRALYREVMLENYRNLEAVDISSKCMMKEVLSTGQGNTEVIHTGTLQRHESHHIGDFCFQEIEKEIHDIEFQCQEDERNGLEAPMTKIKKLTGSTDQHDHRHAGNKPIKDQLGSSFYSHLPELHIFQIKGEIGNQLEKSTNDAPSVSTFQRISCRPQTQISNNYGNNPLNSSLLPQKQEVHMREKSFQCNKSGKAFNCSSLLRKHQIPHLGDKQYKCDVCGKLFNHEQYLACHDRCHTVEKPYKCKECGKTFSQESSLTCHRRLHTGVKRYNCNECGKIFGQNSALLIDKAIDTGENPYKCNECDKAFNQQSQLSHHRIHTGEKPYKCEECDKVFSRKSTIETHKRIHTGEKPYRCKVCDTAFTWHSQLARHRRIHTAKKTYKCNECGKTFSHKSSLVCHHRLHGGEKSYKCKVCDKAFVWSSQLAKHTRIDCGEKPYKCNECGKTFGQNSDLLIHKSIHTGEQPYKCDECEKVFSRKSSLETHKIGHTGEKPYKCKVCDKAFACHSYLAKHTRIHSGEKPYKCNECSKTFSHRSYLVCHHRVHSGEKPYKCNECSKTFSRRSSLHCHRRLHSGEKPYKCNECGNTFRHCSSLIYHRRLHTGEKSYKCTICDKAFVRNSLLSRHTRIHTAEKPYKCNECGKAFNQQSHLSRHHRIHTGEKP

SEQ ID NO: 16297 - protein, 617 aa, Homo Sapiens
MIKSQESLTLEDVAVEFTWEEWQLLGPAQKDLYRDVMLENYSNLVSVGYQASKPDALFKLEQGEPWTVENEIHSQICPEIKKVDNHLQMHSQKQRCLKRVEQCHKHNAFGNIIHQRKSDFPLRQNHDTFDLHGKILKSNLSLVNQNKRYEIKNSVGVNGDGKSFLHAKHEQFHNEMNFPEGGNSVNTNSQFIKHQRTQNIDKPHVCTECGKAFLKKSRLIYHQRVHTGEKPHGCSICGKAFSRKSGLTEHQRNHTGEKPYECTECDKAFRWKSQLNAHQKIHTGEKSYICSDCGKGFIKKSRLINHQRVHTGEKPHGCSLCGKAFSKRSRLTEHQRTHTGEKPYECTECDKAFRWKSQLNAHQKAHTGEKSYICRDCGKGFIQKGNLIVHQRIHTGEKPYICNECGKGFIQKGNLLIHRRTHTGEKPYVCNECGKGFSQKTCLISHQRFHTGKTPFVCTECGKSCSHKSGLINHQRIHTGEKPYTCSDCGKAFRDKSCLNRHRRTHTGERPYGCSDCGKAFSHLSCLVYHKGMLHAREKCVGSVKLENPCSESHSLSHTRDLIQDKDSVNMVTLQMPSVAAQTSLTNSAFQAESKVAIVSQPVARSSVSADSRICTE

SEQ ID NO: 16298 - protein, 585 aa, Homo Sapiens
MIKTQESLTLEDVAVEFSWEEWQLLDTAQKNLYRDVMVENYNHLVSLGYQTSKPDVLSKLAHGQEPWTTDAKIQNKNCPGIGKVDSHLQEHSPNQRLLKSVQQCNGQNTLRNIVHLSKTHFPIVQNHDTFDLYRKNLKSSLSLINQKRRHGINNPVEFIGGEKTLLHGKHERTHTKTRFSENAKCIHTKFQVFKHQRTQKIEKPHACIECEQTFLRKSQLIYHENICIQENPGSGQCEKLSRSVLFTKHLKTNTTDKICIPNEYRKGSTVKSSLITHQQTHTEEKSYMCSECGKGFTMKRYLIAHQRTHSGEKPYVCKECGKGFTVKSNLIVHQRTHTGEKPYICSECGKGFTMKRYLVVHQRTHTGEKPYMCSECGKGFTVKSNLIVHQRSHTGEKSYICSECGKGFTVKRTLVIHQRTHTGEKSYICNECGKGFTTKRTLIIHQRTHTGEKPYECNECGKAFSQKICLIQHERCHTGKTPFVCTECGKSYSHKYGLITHQRIHTGEKPYECNECGKAFTTKSVLNVHQRTHTGERPYGCSDCEKAFSHLSNLVKHKKMHTREMGRISQVENSCNGESQLLPYK

SEQ ID NO: 16299 - protein, 731 aa, Homo Sapiens
MMQAQESLTLEDVAVDFTWEEWQFLSPAQKDLYRDVMLENYSNLVAVGYQASKPDALSKLERGEETCTTEDEIYSRICSEIRKIDDPLQHHLQNQSIQKSVKQCHEQNMFGNIVNQNKGHFLLKQDCDTFDLHEKPLKSNLSFENQKRSSGLKNSAEFNRDGKSLFHANHKQFYTEMKFPAIAKPINKSQFIKQQRTHNIENAHVCSECGKAFLKLSQFIDHQRVHTGEKPHVCSMCGKAFSRKSRLMDHQRTHTELKHYECTECDKTFLKKSQLNIHQKTHMGGKPYTCSQCGKAFIKKCRLIYHQRTHTGEKPHGCSVCGKAFSTKFSLTTHQKTHTGEKPYICSECGKGFIEKRRLTAHHRTHTGEKPFICNKCGKGFTLKNSLITHQQTHTGEKLYTCSECGKGFSMKHCLMVHQRTHTGEKPYKCNECGKGFALKSPLIRHQRTHTGEKPYVCTECRKGFTMKSDLIVHQRTHTAEKPYICNDCGKGFTVKSRLIVHQRTHTGEKPYVCGECGKGFPAKIRLMGHQRTHTGEKPYICNECGKGFTEKSHLNVHRRTHTGEKPYVCSECGKGLTGKSMLIAHQRTHTGEKPYICNECGKGFTMKSTLSIHQQTHTGEKPYKCNECDKTFRKKTCLIQHQRFHTGKTSFACTECGKFSLRKNDLITHQRIHTGEKPYKCSDCGKAFTTKSGLNVHQRKHTGERPYGCSDCGKAFAHLSILVKHRRIHR

SEQ ID NO: 16300 - protein, 781 aa, Homo Sapiens
MATQGHLTFKDVAIEFSQEEWKCLEPVQKALYKDVMLENYRNLVFLGISPKCVIKELPPTENSNTGERFQTVALERHQSYDIENLYFREIQKHLHDLEFQWKDGETNDKEVPVPHENNLTGKRDQHSQGDVENNHIENQLTSNFESRLAELQKVQTEGRLYECNETEKTGNNGCLVSPHIREKTYVCNECGKAFKASSSLINHQRIHTTEKPYKCNECGKAFHRASLLTVHKVVHTRGKSYQCDVCGKIFRKNSYFVRHQRSHTGQKPYICNECGKSFSKSSHLAVHQRIHTGEKPYKCNLCGKSFSQRVHLRLHQTVHTGERPFKCNECGKTFKRSSNLTVHQVIHAGKKPYKCDVCGKAFRHRSNLVCHRRIHSGEKQYKCNECGKVFSKRSSLAVHRRIHTVEKPCKCNECGKVFSKRSSLAVHQRIHTGQKTYKCNKCGKVYSKHSHLAVHWRIHTGEKAYKCNECGKVFSIHSRLAAHQRIHTGEKPYKCNECGKVFSQHSRLAVHRRIHTGEKPYKCKECGKVFSDRSAFARHRRIHTGEKPYKCKECGKVFSQCSRLTVHRRIHSGEKPYKCNECGKVYSQYSHLVGHRRVHTGEKPYKCHECGKAFNQGSTLNRHQRIHTGEKPYKCNQCGNSFSQRVHLRLHQTVHTGDRPYKCNECGKTFKRSSNLTAHQIIHAGKKPYKCDECGKVFRHSSHLVSHQRIHTGEKRYKCIECGKAFGRLFSLSKHQRIHSGKKPYKCNECGKSFICRSGLTKHRIRHTGESLTTKLNVTRP

SEQ ID NO: 16301 - protein, 954 aa, Homo Sapiens
MNQPGGAAAPQADGASAAGRKSTASRERLKRSQKSTKVEGPEPVPAEASLSAEQGTMTEVKVKTELPDDYIQEVIWQGEAKEEKKAVSKDGTSDVPAEICVVIGGVRNQQTLDGKAPEGSPHGGSVRSRYSGTWIFDQALRYASGSYECGICGKKYKYYNCFQTHVRAHRDTEATSGEGASQSNNFRYTCDICGKKYKYYSCFQEHRDLHAVDVFSVEGAPENRADPFDQGVVATDEVKEEPPEPFQKIGPKTGNYTCEFCGKQYKYYTPYQEHVALHAPISTAPGWEPPDDPDTGSECSHPEVSPSPRFVAAKTQTNQSGKKAPASVVRCATLLHRTPPATQTQTFRTPNSGSPASKATAAESAFSRRVEGKAQNHFEETNSSSQNSSEPYTCGACGIQFQFYNNLLEHMQSHAADNENNIASNQSRSPPAVVEEKWKPQAQRNSANNTTTSGLTPNSMIPEKERQNIAERLLRVMCADLGALSVVSGKEFLKLAQTLVDSGARYGAFSVTEILGNFNTLALKHLPRMYNQVKVKVTCALGSNACLGIGVTCHSQSVGPDSCYILTAYQAEGNHIKSYVLGVKGADIRDSGDLVHHWVQNVLSEFVMSEIRTVYVTDCRVSTSAFSKAGMCLRCSACALNSVVQSVLSKRTLQARSMHEVIELLNVCEDLAGSTGLAKETFGSLEETSPPPCWNSVTDSLLLVHERYEQICEFYSRAKKMNLIQSLNKHLLSNLAAILTPVKQAVIELSNESQPTLQLVLPTYVRLEKLFTAKANDAGTVSKLCHLFLEALKENFKVHPAHKVAMILDPQQKLRPVPPYQHEEIIGKVCELINEVKESWAEEADFEPAAKKPRSAAVENPAAQEDDRLGKNEVYDYLQEPLFQATPDLFQYWSCVTQKHTKLAKLAFWLLAVPAVGARSGCVNMCEQALLIKRRRLLSPEDMNKLMFLKSNML

SEQ ID NO: 16302 - protein, 560 aa, Homo Sapiens
MGQPAPYAEGPIQGGDAGELCKCDFLVSISIPQTRSDIPAGARRSSMGPRSLDTCWGRGPERHVHRLECNGVIFTHRNLCLPGGKTKTENEEKTAQLNISKESESHRLIVEGLLMDVPQHPDFKDRLEKSQLHDTGNKTKIGDCTDLTVQDHESSTTEREEIARKLEESSVSTHLITKQGFAKEQVFYKCGECGSYYNPHSDFHLHQRVHTNEKPYTCKECGKTFRYNSKLSRHQKIHTGEKPYSCEECGQAFSQNSHLLQHQKLHGGQRPYECTDCGKTFSYNSKLIRHQRIHTGEKPFKCKECGKAFSCSYDCIIHERIHNGEKPYECKECGKSLSSNSVLIQHQRIHTGEKPYECKECGKAFHRSSVFLQHQRFHTGEQLYKCNECWKTFSCSSRFIVHQRIHNGEKPYECQECGKTFSQKITLVQHQRVHTGEKPYECKECGKAFRWNASFIQHQKWHTRKKLINGTGLSAVKPYCPCAILSPLPPQHTCSALAPPGPPLSSSHAVVLPPSVPFFLLLPSSEKANPSPVQIAHFFQDLAFPGKSSLQSPNPLSHSL

SEQ ID NO: 16303 - protein, 422 aa, Homo Sapiens
MFQTAWRQEPVTFEDVAVYFTQNEWASLDSVQRALYREVMLENYANVASLAFPFTTPVLVSQLEQGELPWGLDPWEPMGREALRGICPGDEARTEKEGLTPKDHVSKETESFRLMVGGLPGNVSQHLDFGSSLEQPQGHWIIKTKSKRRHFTDTSARHHEAYEVKNGEKFEKLGKNISVSTQLTTNQTNPSGQISYECGQCGRYFIQMADFHRHEKCHTGEKSFECKECGKYFRYNSLLIRHQIIHTGKKPFKCKECGKGLSSDTALIQHQRIHTGEKPYECKECGKAFSSSSVFLQHQRFHTGEKLYECNECWKTFSCSSSFTVHQRMHTGEKPYECKECGKRLSSNTALTQHQRIHTGEKPFECKECGKAFNQKITLIQHQRVHTGEKPYECKVCGKTFSWCGRFILHQKLHTQKTPVQA

SEQ ID NO: 16304 - protein, 439 aa, Homo Sapiens
MLQTTWPQESVTFEDVAVYFTQNQWASLDPAQRALYGEVMLENYANVASLVAFPFPKPALISHLERGEAPWGPDPWDTEILRGISQGGESWIKNEGLVIKQEASEETELHRMPVGGLLRNVSQHFDFKRKALKQTFNLNPNLILRGGMKFYECKECGKIFRYNSKLIRHQMSHTGEKPFKCKECGKAFKSSYDCIVHEKNHIGEGPYECKECGKGLSSNTALTQHQRIHTGEKPYECKECGKAFRRSAAYLQHQRLHTGEKLYKCKECWKAFGCRSLFIVHQRIHTGEKPYQCKECGKAFTQKIASIQHQRVHTGEKPYECKVCGKAFKWYGSFVQHQKLHPVEKKPVKVLGPSLVSPQCSSPAIPPVLLQGSCSASAVAVPSLTFPHAVLIPTSGNFFMLLPTSGIPSSSAQIVRVFQGLTPTVKPSPVILTPSSHSS

SEQ ID NO: 16305 - protein, 477 aa, Homo Sapiens
MATYTCITCRVAFRDADMQRAHYKTDWHRYNLRRKVASMAPVTAEGFQERVRAQRAVAEEESKGSATYCTVCSKKFASFNAYENHLKSRRHVELEKKAVQAVNRKVEMMNEKNLEKGLGVDSVDKDAMNAAIQQAIKAQPSMSPKKAPPAPAKEARNVVAVGTGGRGTHDRDPSEKPPRLQWFEQQAKKLAKQQEEDSEEEEEDLDGDDWEDIDSDEELECEDTEAMDDVVEQDAEEEEAEEGPPLGAIPITDCLFCSHHSSSLMKNVAHMTKDHSFFIPDIEYLSDIKGLIKYLGEKVGVGKICLWCNEKGKSFYSTEAVQAHMNDKSHCKLFTDGDAALEFADFYDFRSSYPDHKEGEDPNKAEELPSEKNLEYDDETMELILPSGARVGHRSLMRYYKQRFGLSRAVAVAKNRKAVGRVLQQYRALGWTGSTGAALMRERDMQYVQRMKSKWMLKTGMKNNATKQMHFRVQVRF

SEQ ID NO: 16306 - protein, 536 aa, Homo Sapiens
MILLSFVSDSNVGTGEKKVTEAWISEDENSHRTTSDRLTVMELPSPESEEVHEPRLGELLGNPEGQSLGSSPSQDRGCKQVTVTHWKIQTGETAQVCTKSGRNHILNSDLLLLQRELIEGEANPCNICGKTFTFNSDLVRHRISHAGEKPYTCDQCGKGFGQSSHLMEHQRIHTGERLYVCNVCGKDFIHYSGLIEHQRVHSGEKPFKCAQCGKAFCHSSDLIRHQRVHTRERPFECKECGKGFSQSSLLIRHQRIHTGERPYECNECGKSFIRSSSLIRHYQIHTEVKQYECKECGKAFRHRSDLIEHQRIHTGERPFECNECGKAFIRSSKLIQHQRIHTGERPYVCNECGKRFSQTSNFTQHQRIHTGEKLYECNECGKAFFLSSYLIRHQKIHTGERVYECKECGKAFLQKAHLTEHQKIHSGDRPFECKDCGKAFIQSSKLLLHQIIHTGEKPYVCSYCGKGFIQRSNFLQHQKIHTEEKLYECSQYGRDFNSTTNVKNNQRVHQEGLSLSKAPIHLGERSVDKGEHTGNL

SEQ ID NO: 16307 - protein, 865 aa, Homo Sapiens
MSLQDSTLSREGKPEGEIMAAVFFSVGRLSPEVTQPDEDLHLQAEETQLVKESVTFKDVAIDFTLEEWRLMDPTQRNLHKDVMLENYRNLVSLGLAVSKPDMISHLENGKGPWVTVREISRIPYPDMEPKPATKKATRTKAISEDLSQEAILEKLTENGLWDSRMEGLWKWNDRILRLQNNQENHLSQRIIPLKKTPTSQRGFRFESILIPEPGIATEELHSRCQTQEENFTENLNLITDTHLGKIICKEMKGSKAIRQTSELTLGKKSNNKEKPYKCSTCEKAFHYRSLLIQHQRTHTKEKPYECNECGKTFSQPSYLSQHKKIHTGEKPYKCNECGKAFIASSSLMVHQRIHTKEKPYQCNVCGKSFSQCARLNQHQRIQTGEKPYKCSECGKAFSDKSKLARHQETHNGEKPYKCDDCGKAFRNKSYLSVHQKTHTEEKPYQCNECGKSFKNTTIFNVHQRIHTGEKPFRCNECGKAYRSNSSLIVHIRTHTGEKPYECNECGKAFNRIANFTEHQRIHTGEKPYKCNECGKAFINYSCLTVHHRMHTGEKPYKCTECGKAFMRSSSLIIHQRIHTEEKPYLCNECGESFRIKSHLTVHQRIHTGEKPYKCTDCERAFTKMVNLKEHQKIHTGVKPYKCYDCGKSFRTKSYLIVHQRTHTGEKPYKCNECEKAFTNTSQLTVHQRRHTGEKPYKCNECGKVFTSNSGFNTHQRTHTGEKPFKCNDCGKAFSQMVHVTEHQKIHSGEKPYKCDVCGKAFRRGSYLTVHWRTHTGEKPYTCKECGKGCITLSQLTLHQRIHTGERPYKCEECGKAFRTNSDFTVHLRMHTGEKPYKCNECGKAFRSSSSLTVHQRIHQRETQLI

SEQ ID NO: 16308 - protein, 306 aa, Homo Sapiens
MGERLLESKKDHQHGEILTQVPDDMLKKKTPRVKSCGEVSVGHASLNRHHRADTGHKPYEYQEYGQKPYKCTYCKKAFSDLPYFRTHEWAHTGGKPYDCEECGKSFISRSSIRRHRIMHSGDGPYKCNFCGKALMCLSLYLIHKRTHTGEKPYECKQCGKAFSHSGSLRIHERTHTGEKPYECSECGKAFHSSTCLHAHKITHTGEKPYECKQCGKAFVSFNSVRYHERTHTGEKPYECKQCGKAFRSASHLRTHGRTHTGEKPYECKQCGKAFGCASSVKIHERTHTGEKPCSSNTSKGQGEKIA

SEQ ID NO: 16309 - protein, 528 aa, Homo Sapiens
MGPLQFRDVAIEFSLEEWHCLDTAQRNLYRNVMLENYSNLVFLGITVSKPDLITCLEQGRKPLTMKRNEMIAKPSVMCSHFAQDLWPEQSMKDSFQKVVLRRYEKCEHDNLQLKKGCISVDECKVHKEGYNELNQCLTTTPRKICQCDKYVKVLHQFPNSNGQKRGHTGKKPFKYIECGKAFKQFSTLTTHKKIHTGGKPYKCEECGKAFNHSCSLTRHKKIHTGEKPYKCEECGKAFKHSSTLTTHKRNHTGEKPYKCDKCGKAFMSSSTLSKHEIIHTEKKPYKCEECGKAFNRSSTLTTHKIIHTGEKPYKCEECDKAFKYSYTLTTHKRIHTEDKPYKCEECGKAFKYSSTLTTHKRIHTGEKPYKCEECGKAFKRSSDLTTHKIIHTGEKPYKCEECGKAFKYSSNLTTHKKIHTGERPYKCEECGKAFNQSSILTTHRRIHTGEKFYKCEECGKAFKCSSNLTTHKKIHTGERPYKCEECGKAFNQSSILTTHERIILERNSTNVKNVAKPSSGPHTLLHIR

SEQ ID NO: 16310 - protein, 461 aa, Homo Sapiens
MDSVAFEDVAVNFTLEEWALLDPSQKNLYRDVMRETFRNLASVGKQWEDQNIEDPFKIPRRNISHIPERLCESKEGGQGEETFSQIPDGILNKKTPGVKPCESSVCGEVGMGPSSLNRHIRDHTGREPNEYQEYGKKSYTRNQCGRALSYHRSFPVRERTHPGGKPYDCKECGETFISLVSIRRHMLTHRGGVPYKCKVCGKAFDYPSLFRIHERSHTGEKPYECKQCGKAFSCSSYIRIHERTHTGDKPYECKQCGKAFSCSKYIRIHERTHTGEKPYECKQCGKAFRCASSVRSHERTHTGEKLFECKECGKALTCLASVRRHMIKHTGNGPYKCKVCGKAFDFPSSFRIHERTHTGEKPYDCKQCGKAFSCSSSFRKHERIHTGEKPYKCTKCGKAFSRSSYFRIHERTHTGEKPYECKQCGKAFSRSTYFRVHEKIHTGEKPYENPNPNASVVPVLS

SEQ ID NO: 16311 - protein, 1059 aa, Homo Sapiens
MSGVMVGSHADMAPASTAEGAGEKPGPAAPAPAAQYECGECGKSFRWSSRLLHHQRTHTGERPYKCPDCPKAFKGSSALLYHQRGHTGERPYQCPDCPKAFKRSSLLQIHRSVHTGLRAFICGQCGLAFKWSSHYQYHLRQHTGERPYPCPDCPKAFKNSSSLRRHRHVHTGERPYTCGVCGKSFTQSTNLRQHQRVHTGERPFRCPLCPKTFTHSSNLLLHQRTHGAAPAPGTASAAPPPQSREPGKVFVCDAYLQRHLQPHSPPAPPAPPPPPPPVVPELFLAAAETTVELVYRCDGCEQGFSSEELLLEHQPCPGPDAAPQPQEAPAEAPKADQPPSPLPQPPPPAAAPAPGFACLPCGKSFRTVAGLSRHQHSHGAAGGQAFRCGSCDGSFPQLASLLAHQQCHVEEAAAGRPPPQAEAAEVTCPQEPLAPAAPVPPPPPSAPASAERPYKCAECGKSFKGSSGLRYHLRDHTGERPYQCGECGKAFKRSSLLAIHQRVHTGLRAFTCGQCGLTFKWSSHYQYHLRLHSGERPYACGECGKAFRNTSCLRRHRHVHTGERPHACGVCGKSFAQTSNLRQHQRVHTGERPFRCPLCPKTFTHSSNLLLHQRTHSAERPFTCPICGRGFVMAAYLQRHLRTHAPANTPPSTTAPAAGPQPPAPLAAARAPPATQDVHVLPHLQATLSLEVAGGTAQAPSLGPAAPNSQTFLLVQTAQGLQLIPSSVQPPTPPPPPAPPKLILLPSSSAGAGGGRARQGPRAVGKAGQGAGVVWLPGPGGLGVQGAASAGASGTGQSLIVLQNVGGGEAGPQEMSGVQLQPLRPAPEVTTVQLQPAQEVTTVQLQPAQEVTTVQLQPAQEVTTVQLQPVAGQLSNSSGGAVATEAPNLLVVQSGAAEELLTGPGPGEAGDGEASTGVVQDVLFETLQTDEGLQSVLVLSGADGEQTRLCVQEVETLPPGLTEPPATGPPGQKLLIIRSAPATELLDSSNTGGGTATLQLLAPPPSGPASGPAGLPGAPASQMVQVVPAGAGPGVMTPQGLPSIQIVQTLPAVQLVHTF

SEQ ID NO: 16312 - protein, 869 aa, Homo Sapiens
MEPETALWGPDLQGPEQSPNDAHRGAESENEEESPRQESSGEEIIMGDPAQSPESKDSTEMSLERSSQDPSVPQNPPTPLGHSNPLDHQIPLDPPAPEVVPTPSDWTKACEASWQWGALTTWNSPPVVPANEPSLRELVQGRPAGAEKPYICNECGKSFSQWSKLLRHQRIHTGERPNTCSECGKSFTQSSHLVQHQRTHTGEKPYKCPDCGKCFSWSSNLVQHQRTHTGEKPYKCTECEKAFTQSTNLIKHQRSHTGEKPYKCGECRRAFYRSSDLIQHQATHTGEKPYKCPECGKRFGQNHNLLKHQKIHAGEKPYRCTECGKSFIQSSELTQHQRTHTGEKPYECLECGKSFGHSSTLIKHQRTHLREDPFKCPVCGKTFTLSATLLRHQRTHTGERPYKCPECGKSFSVSSNLINHQRIHRGERPYICADCGKSFIMSSTLIRHQRIHTGEKPYKCSDCGKSFIRSSHLIQHRRTHTGEKPYKCPECGKSFSQSSNLITHVRTHMDENLFVCSDCGKAFLEAHELEQHRVIHERGKTPARRAQGDSLLGLGDPSLLTPPPGAKPHKCLVCGKGFNDEGIFMQHQRIHIGENPYKNADGLIAHAAPKPPQLRSPRLPFRGNSYPGAAEGRAEAPGQPLKPPEGQEGFSQRRGLLSSKTYICSHCGESFLDRSVLLQHQLTHGNEKPFLFPDYRIGLGEGAGPSPFLSGKPFKCPECKQSFGLSSELLLHQKVHAGGKSSQKSPELGKSSSVLLEHLRSPLGARPYRCSDCRASFLDRVALTRHQETHTQEKPPNPEDPPPEAVTLSTDQEGEGETPTPTESSSHGEGQNPKTLVEEKPYLCPECGAGFTEVAALLLHRSCHPGVSL

SEQ ID NO: 16313 - protein, 485 aa, Homo Sapiens
MNEYPKKRKRKTLHPSRYSDSSGISRIADGFNGIFSDHCYSVCSMRQPDLKYFDNKDDDSDTETSNDLPKFADGIKARNRNQNYLVPSPVLRILDHTAFSTEKSADIVICDEECDSPESVNQQTQEESPIEVHTAEDVPIAVEVHAISEDYDIETENNSSESLQDQTDEEPPAKLCKILDKSQALNVTAQQKWPLLRANSSGLYKCELCEFNSKYFSDLKQHMILKHKRTDSNVCRVCKESFSTNMLLIEHAKLHEEDPYICKYCDYKTVIFENLSQHIADTHFSDHLYWCEQCDVQFSSSSELYLHFQEHSCDEQYLCQFCEHETNDPEDLHSHVVNEHACKLIELSDKYNNGEHGQYSLLSKITFDKCKNFFVCQVCGFRSRLHTNVNRHVAIEHTKIFPHVCDDCGKGFSSMLEYCKHLNSHLSEGIYLCQYCEYSTGQIEDLKIHLDFKHSADLPHKCSDCLMRFGNERELISHLPVHETT

SEQ ID NO: 16314 - protein, 438 aa, Homo Sapiens
MQAEDRSQFGSAAEMLSEQTAALGTGWESMNVQLDGAEPQVERGSQEERPWRTVPGPLEHLCCDLEEEPQSLQEKAQSAPWVPAIPQEGNTGDWEMAAALLAAGSQGLVTIKDVSLCFSQEEWRSLDPSQTDFYGEYVMQENCGIVVSLRFPIPKLDMLSQLEGGEEQWVPDPQDLEERDILRVTYTGDGSEHEGDTPELEAEPPRMLSSVSEDTVLWNPEHDESWDSMPSSSRGMLLGPPFLQEDSFSNLLCSTEMDSLLRPHTCPQCGKQFVWGSHLARHQQTHTGERPYSCLKCEKTFGRRHHLIRHQKTHLHDKTSRCSECGKNFRCNSHLASHQRVHAEGKSCKGQEVGESPGTRKRQRAPPVPKCHVCTECGKSFGRRHHLVRHWLTHTGEKPFQCPRCEKSFGRKHHLDRHLLTHQGQSPRNSWDRGTSVF

SEQ ID NO: 16315 - protein, 1327 aa, Homo Sapiens
MRSFLQQDVNKTKSRLNVLNGLANNMDDLKINTDITGAKEELLDDNNFISDKESGVHKPKDCQTSFQKNNTLTLPEELSKDKSENALSGGQSSLFIHAGAPTVSSENFILPKGAAVNGPVSHSSLTKTSNMNKGSVSLTTGQPVDQPTTESCSTLKVAADLQLSTPQKASQHQVLFLLSDVAHAKNPTHSNKKLPTSASVGCDIQNSVGSNIKSDGTLINQVEVGEDGEDLLVKDDCVNTVTGISSGTDGFRSENDTNWDPQKEFIQFLMTNEETVDKAPPHSKIGLEKKRKRKMDVSKITRYTEDCFSDSNCVPNKSKMQEVDFLEQNEELQAVDSQKYALSKVKPESTDEDLESVDAFQHLIYNPDKCGEESSPVHTSTFLSNTLKKKCEESDSESPATFSTEEPSFYPCTKCNVNFREKKHLHRHMMYHLDGNSHFRHLNVPRPYACRECGRTFRDRNSLLKHMIIHQERRQKLMEEIRELKELQDEGRSARLQCPQCVFGTNCPKTFVQHAKTHEKDKRYYCCEECNFMAVTENELECHRGIAHGAVVKCPMVTSDIAQRKTQKKTFMKDSVVGSSKKSATYICKMCPFTTSAKSVLKKHTEYLHSSSCVDSFGSPLGLDKRKNDILEEPVDSDSTKTLTKQQSTTFPKNSALKQDVKRTFGSTSQSSSFSKIHKRPHRIQKARKSIAQSGVNMCNQNSSPHKNVTIKSSVDQKPKYFHQAAKEKSNAKANSHYLYRHKYENYRMIKKSGESYPVHFKKEEASSLNSLHLFSSSSNSHNNFISDPHKPDAKRPESFKDHRRVAVKRVIKESKKESSVGGEDLDSYPDFLHKMTVVVLQKLNSAEKKDSYETEDESSWDNVELGDYTTQAIEDETYSDINQEHVNLFPLFKSKVEGQEPGENATLSYDQNDGFYFEYYEDTGSNNFLHEIHDPQHLETADASLSKHSSVFHWTDLSLEKKSCPYCPATFETGVGLSNHVRGHLHRAGLSYEARHVVSPEQIATSDKMQHFKRTGTGTPVKRVRKAIEKSETTSEHTCQLCGGWFDTKIGLSNHVRGHLKRLGKTKWDAHKSPICVLNEMMQNEEKYEKILKALNSRRIIPRPFVAQKLASSDDFISQNVIPLEAYRNGLKTEALSVSASEEEGLNFLNEYDETKPELPSGKKNQSLTLIELLKNKRMGEERNSAISPQKIHNQTARKRFVQKCVLPLNEDSPLMYQPQKMDLTMHSALDCKQKKSRSRSGSKKKMLTLPHGADEVYILRCRFCGLVFRGPLSVQEDWIKHLQRHIVNANLPRTGAGMVEVTSLLKKPASITETSFSLLMAEAAS

SEQ ID NO: 16316 - protein, 425 aa, Homo Sapiens
MNKMPAGEQECEYNKEGKYYSKGVKLVRKKKKIPGYRWGDIKINIIGEKDDLPIHFCDKCDLPIKIYGRIIPCKHAFCYHCANLYDKVGYKVCPRCRYPVLRIEAHKRGSVFMCSIVQQCKRTYLSQKSLQAHIKRRHKRARKQVTSASLEKVRPHIAPPQTEISDIPKRLQDRDHLSYIPPEQHTMVSLPSVQHMLQEQHNQPHKDIQAPPPELSLSLPFPIQWETVSIFTRKHGNLTVDHIQNNSDSGAKKPTPPDYYPECQSQPAVSSPHHIIPQKQHYAPPPSPSSPVNHQMPYPPQDVVTPNSVRSQVPALTTTYDPSSGYIIVKVPPDMNSPPLRAPQSQNGNPSASEFASHHYNLNILPQFTENQETLSPQFTQTDAMDHRRWPAWKRLSPCPPTRSPPPSTLHGRSHHSHQRRHRRY

SEQ ID NO: 16317 - protein, 1829 aa, Homo Sapiens
MEDTPPSLSCSDCQRHFPSLPELSRHRELLHPSPNQDSEEADSIPRPYRCQQCGRGYRHPGSLVNHRRTHETGLFPCTTCGKDFSNPMALKSHMRTHAPEGRRRHRPPRPKEATPHLQGETVSTDSWGQRLGSSEGWENQTKHTEETPDCESVPDPRAASGTWEDLPTRQREGLASHPGPEDGADGWGPSTNSARAPPLPIPASSLLSNLEQYLAESVVNFTGGQEPTQSPPAEEERRYKCSQCGKTYKHAGSLTNHRQSHTLGIYPCAICFKEFSNLMALKNHSRLHAQYRPYHCPHCPRVFRLPRELLEHQQSHEGERQEPRWEEKGMPTTNGHTDESSQDQLPSAQMLNGSAELSTSGELEDSGLEEYRPFRCGDCGRTYRHAGSLINHRKSHQTGVYPCSLCSKQLFNAAALKNHVRAHHRPRQGVGENGQPSVPPAPLLLAETTHKEEEDPTTTLDHRPYKCSECGRAYRHRGSLVNHRHSHRTGEYQCSLCPRKYPNLMALRNHVRVHCKAARRSADIGAEGAPSHLKVELPPDPVEAEAAPHTDQDHVCKHEEEATDITPAADKTAAHICSICGLLFEDAESLERHGLTHGAGEKENSRTETTMSPPRAFACRDCGKSYRHSGSLINHRQTHQTGDFSCGACAKHFHTMAAMKNHLRRHSRRRSRRHRKRAGGASGGREAKLLAAESWTRELEDNEGLESPQDPSGESPHGAEGNLESDGDCLQAESEGDKCGLERDETHFQGDKESGGTGEGLERKDASLLDNLDIPGEEGGGTHFCDSLTGVDEDQKPATGQPNSSSHSANAVTGWQAGAAHTCSDCGHSFPHATGLLSHRPCHPPGIYQCSLCPKEFDSLPALRSHFQNHRPGEATSAQPFLCCLCGMIFPGRAGYRLHRRQAHSSSGMTEGSEEEGEEEGVAEAAPARSPPLQLSEAELLNQLQREVEALDSAGYGHICGCCGQTYDDLGSLERHHQSQSSGTTADKAPSPLGVAGDAMEMVVDSVLEDIVNSVSGEGGDAKSQEGAGTPLGDSLCIQGGESLLEAQPRPFRCNQCGKTYRHGGSLVNHRKIHQTGDFLCPVCSRCYPNLAAYRNHLRNHPRCKGSEPQVGPIPEAAGSSELQVGPIPEGGSNKPQHMAEEGPGQAEVEKLQEELKVEPLEEVARVKEEVWEETTVKGEEIEPRLETAEKGCQTEASSERPFSCEVCGRSYKHAGSLINHRQSHQTGHFGCQACSKGFSNLMSLKNHRRIHADPRRFRCSECGKAFRLRKQLASHQRVHMERRGGGGTRKATREDRPFRCGQCGRTYRHAGSLLNHRRSHETGQYSCPTCPKTYSNRMALKDHQRLHSENRRRRAGRSRRTAVRCALCGRSFPGRGSLERHLREHEETEREPANGQGGLDGTAASEANLTGSQGLETQLGGAEPVPHLEDGVPRPGERSQSPIRAASSEAPEPLSWGAGKAGGWPVGGGLGNHSGGWVPQFLTRSEEPEDSVHRSPCHAGDCQLNGPTLSHMDSWDNRDNSSQLQPGSHSSCSQCGKTYCQSGSLLNHNTNKTDRHYCLLCSKEFLNPVATKSHSHNHIDAQTFACPDCGKAFESHQELASHLQAHARGHSQVPAQMEEARDPKAGTGEDQVVLPGQGKAQEAPSETPRGPGESVERARGGQAVTSMAAEDKERPFRCTQCGRSYRHAGSLLNHQKAHTTGLYPCSLCPKLLPNLLSLKNHSRTHTDPKRHCCSICGKAFRTAARLEGHGRVHAPREGPFTCPHCPRHFRRRISFVQHQQQHQEEWTVAGSGRGHEGSQEEVGTQWRGKSSPKVGGGARSERREPRGF

SEQ ID NO: 16318 - protein, 568 aa, Homo Sapiens
MAQVDSQDRWGEASPLSSLTEEAHDTQMLSMNLESDDEDGGEAEKEGTADPVACPRGSSPVTHENPDLPWPHPLGKEEEKFSDSSSAGGMGQKPVEMSGKASWSRDVTKINETQGSPGASRALGSLPSGLAHKLLGQMQPLGDRLPAGDDGYSGANQDAVLDVPPSFPSNGKYLCAHKSVDTSAGNSSLLCFPRPGSNWDLPTQETHTPAQASATPASLAAAVLAKARNSRKVQNQAGRREGGEAEARPYRCLRGGRAFQKPSKPLSPAETRGGAAKRYACELCGKAYSHRGTLQQHRRLHTGERPYQCSFCDKAYTWSSDHRKHIRTHTGEKPYPCPDCGKAFVRSSDLRKHQRNMHSNNKPFPCSECGLTFNKPLSLLRHQRTHLGAKPFRCPACDREFAVASRMVEHQRVHSGERPFPCPTCGKCFTKSSNLSEHQTLHTGQRPFKCADCGVAFAQPSRLVRHQRIHTGERPFPCTQCGQAFARSSTLKRHQQIHSGEKGFLCAECGRAFRIASELAQHIRMHNGERPYQCEDCGQAFTRSNHLQRHRAKHGTCKKEPIPSSSDE

SEQ ID NO: 16319 - protein, 505 aa, Homo Sapiens
MTKAQESLTLEDVAVDFTWEEWQFLSPAQKDLYRDVMLENYSNLVSVGYQAGKPDALTKLEQGEPLWTLEDEIHSPAHPEIEKADDHLQQPLQNQKILKRTGQRYEHGRTLKSYLGLTNQSRRYNRKEPAEFNGDGAFLHDNHEQMPTEIEFPESRKPISTKSQFLKHQQTHNIEKAHECTDCGKAFLKKSQLTEHKRIHTGKKPHVCSLCGKAFYKKYRLTEHERAHRGEKPHGCSLCGKAFYKRYRLTEHERAHKGEKPYGCSECGKAFPRKSELTEHQRIHTGIKPHQCSECGRAFSRKSLLVVHQRTHTGEKPHTCSECGKGFIQKGNLNIHQRTHTGEKPYGCIDCGKAFSQKSCLVAHQRYHTGKTPFVCPECGQPCSQKSGLIRHQKIHSGEKPYKCSDCGKAFLTKTMLIVHHRTHTGERPYGCDECEKAYFYMSCLVKHKRIHSREKRGDSVKVENPSTASHSLSPSEHVQGKSPVNMVTVAMVAGQCEFAHILHS

SEQ ID NO: 16320 - protein, 606 aa, Homo Sapiens
MSHTASSCQELVENCAVHVAGMAQEDSRRGQVPSSFYHGANQELDLSTKVYKRESGSPYSVLVDTKMSKPHLHETEEQPYFRETRAVSDVHAVKEDRENSDDTEEEEEEVSYKREQIIVEVNLNNQTLNVSKGEKGVSSQSKETPVLKTSSEEEEEESEEEATDDSNDYGENEKQKKKEKIVEKVSVTQRRTRRAASVAAATTSPTPRTTRGRRKSVEPPKRKKRATKEPKAPVQKAKCEEKETLTCEKCPRVFNTRWYLEKHMNVTHRRMQICDKCGKKFVLESELSLHQQTDCEKNIQCVSCNKSFKKLWSLHEHIKIVHGYAEKKFSCEICEKKFYTMAHVRKHMVAHTKDMPFTCETCGKSFKRSMSLKVHSLQHSGEKPFRCENCDERFQYKYQLRSHMSIHIGHKQFMCQWCGKDFNMKQYFDEHMKTHTGEKPFICEICGKSFTSRPNMKRHRRTHTGEKPYPCDVCGQRFRFSNMLKAHKEKCFRVTSPVNVPPAVQIPLTTSPATPVPSVVNTATTPTPPINMNPVSTLPPRPIPHPFSHLHIHPHPHHPHHLPIPPVPHLPPPPALFKSEPLNHRGQSEDNFLRHLAEKNSSAQHH

SEQ ID NO: 16321 - protein, 615 aa, Homo Sapiens
MAERALEPEAEAEAEAGAGGEAAAEEGAAGRKARGRPRLTESDRARRRLESRKKYDVRRVYLGEAHGPWVDLRRRSGWSDAKLAAYLISLERGQRSGRHGKPWEQVPKKPKRKKRRRRNVNCLKNVVIWYEDHKHRCPYEPHLAELDPTFGLYTTAVWQCEAGHRYFQDLHSPLKPLSDSDPDSDKVGNGLVAGSSDSSSSGSASDSEESPEGQPVKAAAAAAAATPTSPVGSSGLITQEGVHIPFDVHHVESLAEQGTPLCSNPAGNGPEALETVVCVPVPVQVGAGPSALFENVPQEALGEVVASCPMPGMVPGSQVIIIAGPGYDALTAEGIHLNMAAGSGVPGSGLGEEVPCAMMEGVAAYTQTEPEGSQPSTMDATAVAGIETKKEKEDLCLLKKEEKEEPVAPELATTVPESAEPEAEADGEELDGSDMSAIIYEIPKEPEKRRRSKRSRVMDADGLLEMFHCPYEGCSQVYVALSSFQNHVNLVHRKGKTKVCPHPGCGKKFYLSNHLRRHMIIHSGVREFTCETCGKSFKRKNHLEVHRRTHTGETPLQCEICGYQCRQRASLNWHMKKHTAEVQYNFTCDRCGKRFEKLDSVKFHTLKSHPDHKPT

SEQ ID NO: 16322 - protein, 581 aa, Homo Sapiens
MLCNKEFLGGHIVRHAQAHQKKGSFACVICGRKFRNRGLMQKHLKNHVKKIQRQQIAAAQQDDQEVTALEEINCSSSSISFENGNSDSKDLEVETLTASSEGNKEVIPEHVAEFIEIPISVPEDVIENVIENGSPNNSLNNVFKPLTECGDDYEEEEDEEGDYEEDDYDLNQETSVIHKINGTVCHPKDIYATDQEGNFKCPALGCVRIFKRIGFLNKHAMTVHPTDLNVRQTVMKWSKGKCKFCQRQFEDSQHFIDHLNRHSYPNVYFCLHFNCNESFKLPFQLAQHTKSHRIFQAQCSFPECHELFEDLPLLYEHEAQHYLSKTPESSAQPSETILWDVQTDSNPNQEKDSSSNEKQTISLPVSTSKSRKESTEPKTCIESMEKKTDSLVQNGNERSDDTVSNISLIDQKMPDIEPNSENNCSSSDIVNGHSEIEQTPLVSSDPALKIDTNRIRTENGSILPSVVPQEHNTLPVSQAPSKPNLTSEHTSYGLILTKPYVRPLPPSYLDERYLSMPKRRKFLTDRVDACSDQDNVYKKSVKRLRCGKCLTTYCNAEALEAHLAQKKCQTLFGFDSDDESA

SEQ ID NO: 16323 - protein, 491 aa, Homo Sapiens
MEEIPAQEAAGSPRVQFQSLETQSECLSPEPQFVQDTDMEQGLTGDGETREENKLLIPKQKISEEVHSYKVRVGRLKHDITQVPETREVYKSEDRLERLQEILRKFLYLEREFRQITISKETFTSEKNNECHEPEKSFSLDSTIDADQRVLRIQNTDDNDKYDMSFNQNSASGKHEHLNLTEDFQSSECKESLMDLSHLNKWESIPNTEKSYKCDVCGKIFHQSSALTRHQRIHTREKPYKCKECEKSFSQSSSLSRHKRIHTREKPYKCEASDKSCEASDKSCSPSSGIIQHKKIHTRAKSYKCSSCERVFSRSVHLTQHQKIHKEMPCKCTVCGSDFCHTSYLLEHQRVHHEEKAYEYDEYGLAYIKQQGIHFREKPYTCSECGKDFRLNSHLIQHQRIHTGEKAHECNECGKAFSQTSCLIQHHKMHRKEKSYECNEYEGSFSHSSDLILQQEVLTRQKAFDCDVWEKNSSQRAHLVQHQSIHTKENS

SEQ ID NO: 16324 - protein, 1059 aa, Homo Sapiens
MNMSQASVSFQDVTVEFTREEWQHLGPVERTLYRDVMLENYSHLISVGYCITKPKVISKLEKGEEPWSLEDEFLNQRYPGYFKVDHIKGIREKQEKPLWQEIFISDADKTLSKEGQKVLEKPFNLEIAPELSEKISCKCDSHRMNLPVASQLIISERKYSRKKTEYMNVCEKLQLDIKHEKAHAEEKSYEHGENAKAFSYKKDQHWKFQTLEESFECDGSGQGLYDKTICITPQSFLTGEKSCKDDEFRKNFDKITLFNHMRTDTRGKCSDLNEYGTSCDKTTAVEYNKVHMAMTHYECNERGINFSRKSPLTQSQRTITGWSAFESNKCEENFSQSSAHIVHQKTQAGDKFGEHNECTDALYQKLDFTAHQRIHTEDKFYLSDEHGKCRKSFYRKAHLIQHQRPHSGEKTYQYEECAKSFCSSSHPIQHPGTYVGFKLYECNECGKAFCQNSNLSKHLRIHTKEKPCDNNGCGRSYKSPLIGHQKTDAEMELCGGSEYGKTSHLKGHQRILMGEKPYECIECGKTFSKTSHLRAHQRIHTGEKPYECVECEKTFSHKTHLSVHQRVHTGEKPYECNDCGKSFTYNSALRAHQRIHTGEKPYECSDCEKTFAHNSALRAHHRIHTGEKPYECNECGRSFAHISVLKAHQRIHTGEKPYECNECGRSFTYNSALRAHQRIHTGRKPYECSDCEKTFAHNSALKIHQRIHTGEKPYECNECEKTFAHNSALRAHQNIHTGEKLYECSECGKTFFQKTRLSTHRRIHTGEKPYECSKCGKTFSQKSYLSGHERIHTGEKPYECNVCGKTFVYKAALIVHQRIHTGEKPYECNQCGKTFSQRTHLCAHQRIHTGEKPYECNECGKTFADNSALRAHHRIHTGEKPYECNDCGKTFSKTSHLRAHLRTRSGEKPYECSECGKTFSEKSYVSAHQRVHTGEKPYECNVCGKPFAHNSTLRVHQRIHTGEKSYECNDCGKTFSQKSHLSAHQRIHTGEKPYECNECGKAFAQNSTLRVHQRIHTGEKPYECDECGKTFVRKAALRVHHTRMHTREKTLACNGFGKS

SEQ ID NO: 16325 - protein, 819 aa, Homo Sapiens
MMNLEKNFDKTTLFNHMRTDKRGKCSDLNEYGTSCDKTTAVEYNKVHMAMTHYECNERGINFSRKSPLTQSQRTITGWSAFESNKCEENFSQSSAHIVHQKTQAGDKFGEHNECTDALYQKLDFTAHQRIHTDFTAHQKFYLSDEHGKCRKSFYWKAHLIQHERPHSGEKTYQYEECAKSFCSSSHPIQHPGTYVGFKLYECNECGKAFCQNSNLSKHLRIHTKEKPCDNNGCGRSYKSPLIGHQKTDAEMELCGGSEYGKTSHLKGHQRILMGEKPYECIECGKTFSKTSHLRAHQRIHTGEKPYECVECEKTFSHKTHLSVHQRVHTGEKPYECNDCGKSFTYNSALRAHQRIHTGEKPYECSDCEKTFAHNSALRAHHRIHTGEKPYECNECGRSFAHISVLKAHQRIHTREKPYECNECGRSFTYNSALRAHQRIHTGRKPYECSDCEKTFAHNSALKIHQRIHTGEKPYKCNECEKTFAHNSALRAHQNIHTGEKLYECSECGKTFFQKTRLSTHRRIHTGEKPYECSKCGKTFSQKSYLSGHERIHTGEKPYECNVCGKTFVYKAALIVHQRIHTGEKPYECNECGKTFSQRTHLCAHQRIHTGEKPYECNECGKTFADNSALRAHHRIHTGEKPYECNDCGKTFSKTSHLRAHLRTRSGEKPYECSECGKTFSEKSYVSAHQRVHTGEKPYECNVCGKPFAHNSTLRVHQRIHTGEKSYECNDCGKTFSQKSHLSAHQRIHTGEKPYECNECGKAFAQNSTLRVHQRIHTGEKPYECDECGKTFVRKAALRVHHTRMHTREKTLACNGFGKS

SEQ ID NO: 16326 - protein, 573 aa, Homo Sapiens
MGPLQFRDVAIEFSLEEWHCLDMAQRNLYRDVMLENYRNLVFLGIVVSKPDLITHLEQGKKPSTMQRHEMVANPSVLCSHFNQDLWPEQSIKDSFQKLILRRHKKCGHDNLQLKKGCESVDKCKVHKRGYNGLNQCLTTTQSKMFQCDKHGKVFHQFSNTNRHKIRHTGKNPCKFTECGKAFNRSSTFTTHKKIHTGEKPYKCIECGKAFNRSSHLTTHKIIHTGEKRYKCEDCGKAFNRSSNLTTHKKIHTGEKPYKCEECGKAFKRSSILTTHKRIHTGEKPYKCEECGKVFKYLSSLSTHKIIHTGEKPYKCEECGKAFNWSSHLTTHKRIHTGEKPYKCEECGKGFKYSSTLTKHKIIHTGEKPYKCEECGEAFKYSCSLTAHKIIHTGKKPYKCEECGKVFKHSSPLSKHKRIHTGEKPYKCEECGKAFSRSSILTTHKIIHTGEKPYECEDCGKAFNRSSNLTKHKKIHTGEKPYKCEECGKAFKCSSILTTHKRIHTADKPYKCEECGKDFKYSSTLTRHKKIHTGGKPHKCNKCGKAFISSSNLSRHEIIHMGGNPYKCENVAKP

SEQ ID NO: 16327 - protein, 331 aa, Homo Sapiens
MRRKTRNFKHKTVKDNKVLTEGSDQESEKDNSQCCDPATNERVQAEKRQYVCTECGKAFSQSANLTVHERIHTGEKPYKCKECGKAFSHSSNLVVHRRIHTGLKPYTCSECGKSFSGKSHLIRHQGIHSGEKTYECKECGKAFSRSSGLISHHRVHTGEKPYSCIECGKAFSRSSNLTQHQRMHRGKKVYKCKECGKTCGSNTKIMDHQRIHTGEKPYECDECGKTFILRKTLNEHQRLHRREKPYKCNECGKAFTSNRNLVDHQRVHTGEKPYKCNECGKTFRQTSQVILHLRTHTKEKPYKCSECGKAYRYSSQLIQHQRKHNEEKETS

SEQ ID NO: 16328 - protein, 426 aa, Homo Sapiens
MLENYGAVASLAAFPFPKPALISQLERGETPWCSVPRGALDGEAPRGISSGYPFLKPAGISHPEQVEEPLNLKLQGEGPSLICPEGVLKRKKEDFILKEEIIEEAQDLMVLSSGPQWCGSQELWFGKTCEEKSRLGRWPGYLNGGRMESSTNDIIEVIVKDEMISVEESSGNTDVNNLLGIHHKILNEQIFYICEECGKCFDQNEDFDQHQKTHNGEKVYGCKECGKAFSFRSHCIAHQRIHSGVKPYECQECAKAFVWKSNLIRHQRIHTGEKPFECKECGKGFSQNTSLTQHQRIHTGEKPYTCKECGKSFTRNPALLRHQRMHTGEKPYECKDCGKGFMWNSDLSQHQRVHTGDKPHECTDCGKSFFCKAHLIRHQRIHTGERPYKCNDCGKAFSQNSVLIKHQRRHARDKPYNCQISHLLEH

SEQ ID NO: 16329 - protein, 261 aa, Homo Sapiens
MIYKCPMCREFFSERADLFMHQKIHTAEKPHKCDKCDKGFFHISELHIHWRDHTGEKVYKCDDCGKDFSTTTKLNRHKKIHTVEKPYKCYECGKAFNWSSHLQIHMRVHTGEKPYVCSECGRGFSNSSNLCMHQRVHTGEKPFKCEECGKAFRHTSSLCMHQRVHTGEKPYKCYECGKAFSQSSSLCIHQRVHTGEKPYRCCGCGKAFSQSSSLCIHQRVHTGEKPFKCDECGKAFSQSTSLCIHQRVHTKERNHLKISVI

SEQ ID NO: 16330 - protein, 613 aa, Homo Sapiens
MGEAFYTVKLERLESCDTVGLSFQEVQKNTYDFECQWKDDEGNYKTVLMLQKENLPGRRAQRDRRAAGNRHIENQLGVSFQSHLPELQQFQHEGKIYEYNQVEKSPNNRGKHYKCDECGKVFSQNSRLTSHKRIHTGEKPYQCNKCGKAFTVRSNLTIHQVIHTGEKPYKCNECGKVFSQPSNLAGHQRIHTGEKPYKCNECGKAFRAHSKLTTHQVIHTGEKPYKCKECGKCFTQNSHLASHRRIHTGEKPYKCNECGKAFSVRSSLTTHQTIHTGEKPYKCNECGKVFRHNSYLAKHRRIHTGEKPYKCNECGKAFSMHSNLTKHQIIHTGEKPFKCNECVKVFTQYSHLANHRRIHTGEKPYRCDECGKAFSVRSSLTTHQAIHTGEKPYKCNDCGKVFTQNSHLASHRGIHSGEKPYKCDECGKAFSQTSQLARHWRVHTGEKPYKCNECGKAFSVHSSLTIHQTIHTGQKPYKCNDCGKVFRHNSYLAIHQRIHTGEKPYKCNECGKAFSVHSNLATHQVIHTGEKPYKCNECGKVFTQNSHLANHRRIHTGEKPYRCNECGKAFSVRSTLTTHMAVHTGDKPYKCNQCGKVFTQNSNLAKHRRIHSG

SEQ ID NO: 16331 - protein, 610 aa, Homo Sapiens
MPSARGKSKSKAPITFGDLAIYFSQEEWEWLSPIQKDLYEDVMLENYRNLVSLGLSFRRPNVITLLEKGKAPWMVEPVRRRRAPDSGSKCETKKLPPNQCNKSGQSICQKLVSAQQKAPTRKSGCNKNSVLVKPKKGHSGKKPLKCNDCGKTFSRSFSLKLHQNIHTGEKPFECSNCRKAFRQISSILLHQRIHSGKKSHECNKCGESFNQRTTLILHMRIHDGKEILDCGKALSQCQSFNIHQKIHVVGNVCQCRKCGKAFNQMSSLLLHKKIHNGKKTHKYNKCGRGFKKKSVFVVHKRIHAGEKIPENAKALSQSLQQRSHHLENPFKCRKCGKLFNRISPLMLHQRIHTSEKPYKCDKCDKFFRRLSTLILHLRIHNGEKLYRCNKCEKVCNRHSSLIQHQKVHTKKKKLFECKECGKMFSGTANLKIHQNIHSEEKPFKCNKCSKVFGRQSFLIEHQRIHTGEKPYQCEECGKAFSHRISLTRHKRIHTEDRPYECDQCGKAFSQSAHLAQHERIHTGEKPYTCKTCGKAFSQRTSLILHERSHTGEKPYECNECGKAFSSGSDLIRHQRSHSSEKPYECSKCGKAYSRSSSLIRHQNTHSEEKA

SEQ ID NO: 16332 - protein, 619 aa, Homo Sapiens [sequence omitted]

SEQ ID NO: 16333 - protein, 464 aa, Homo Sapiens
MVSGLRLASRSGEEGWLKPAVARLGPPRHRLRNLRTESPWRSRGSVLFCSGPGRAGRAAEPLHPVCTCGRHFRRPEPCREPLASPIQDSVAFEDVAVNFTQEEWALLDSSQKNLYREVMQETCRNLASVGSQWKDQNIEDHFEKPGKDIRNHIVQRLCESKEDGQYGEVVSQIPNLDLNENISTGLKPCECSICGKVFVRHSLLNRHILAHSGYKPYGEKQYKCEQCGKFFVSVPGVRRHMIMHSGNPAYKCTICGKAFYFLNSVERHQRTHTGEKPYKCKQCGKAFTVSGSCLIHERTHTGEKPYECKECGKTFRFSCSFKTHERTHTGERPYKCTKCDKAFSCSTSLRYHGSIHTGERPYECKQCGKAFSRLSSLCNHRSTHTGEKPYECKQCDQAFSRLSSLHLHERIHTGEKPYECKKCGKAYTRSSHLTRHERSHDIEAGCSDSAYNPSTLGGQGVWIA

SEQ ID NO: 16334 - protein, 389 aa, Homo Sapiens
MDSVSFEDVAVAFTQEEWALLDPSQKNLYRDVMQEIFRNLASVGNKSEDQNIQDDFKNPGRNLSSHVVERLFEIKEGSQYGETFSQDSNLNLNKKVSTGVKPCECSVCGKVFICHSALHRHILSHIGNKLFECEECPEKLYHCKQCGKAFISLTSVDRHMVTHTSNGPYKGPVYEKPFDFPSVFQMPQSTYTGEKTYKCKHCDKAFNYSSYLREHERTHTGEKPYACKKCGKSFTFSSSLRQHERSHTGEKPYECKECGKAFSRSTYLGIHERTHTGEKPYECIKCGKAFRCSRVLRVHERTHSGEKPYECKQCGKAFKYSSNLCEHERTHTGVKPYGCKECGKSFTSSSALRSHERTHTGEKPYECKKCGKAFSCSSSLRKHERAYMW

SEQ ID NO: 16335 - protein, 534 aa, Homo Sapiens
MLSPVSRDASDALQGRKCLRPRSRRLPLPAAVRAHGPMAELTDSARGCVVFEDVFVYFSREEWELLDDAQRLLYHDVMLENFALLASLGIAFSRSRAVMKLERGEEPWVYDQVDMTSATEREAQRGLRPGCWHGVEDEEVSSEQSIFVAGVSEVRTLMAELESHPCDICGPILKDTLHLAKYHGGKARQKPYLCGACGKQFWFSTDFDQHQNQPNGGKLFPRKEGRDSVKSCRVHVPEKTLTCGKGRRDFSATSGLLQHQASLSSMKPHKSTKLVSGFLMGQRYHRCGECGKAFTRKDTLARHQRIHTGERPYECNECGKFFSQSYDLFKHQTVHTGERPYECSECGKFFRQISGLIEHRRVHTGERLYQCGKCGKFFSSKSNLIRHQEVHTGARPYVCSECGKEFSRKHTLVLHQRTHTGERPYECSECGKAFSQSSHLNVHWRIHSSDYECSRCGKAFSCISKLIQHQKVHSGEKPYECSKCGKAFTQRPNLIRHWKVHTGERPYVCSECGREFIRKQTLVLHQRVHAGEKL

SEQ ID NO: 16336 - protein, 452 aa, Homo Sapiens
MFATSGAVAAGKPYSCSECGKSFCYSSVLLRHERAHGGDGRFRCLECGERCARAADLRAHRRTHAGQTLYICSECGQSFRHSGRLDLHLGAHRQRCRTCPCRTCGRRFPHLPALLLHRRRQHLPERPRRCPLCARTFRQSALLFHQARAHPLGTTSDPAAPPHRCAQCPRAFRSGAGLRSHARIHVSRSPTRPRVSDAHQCGVCGKCFGKSSTLTRHLQTHSGEKPFKCPECGKGFLESATLVRHQRTHTGEKPYACGDCGRCFSESSTLLRHRRSHQGERPHACATCGKGFGQRSDLVVHQRIHTGEKPFACPECGRRFSDRSDLTKHRRTHTGEKPYRCELCGKRFTCVSNLNVHRRNHAGHKPHKCPECSKAFSVASKLALHRKTHLGERPAECAECGKCFSHSRSLSQHQRAHTRARTAAAVAIQSAVGTALVFEGPAEQEKPGFSVS

SEQ ID NO: 16337 - protein, 581 aa, Homo Sapiens
MAMSQESLTFKDVFVDFTLEEWQQLDSAQKNLYRDVMLENYSHLVSVGHLVGKPDVIFRLGPGDESWMADGGTPVRTCAGEDRPEVWEVDEQIDHYKESQDKFLWQAAFIGKETLKDESGQECKICRKIIYLNTDFVSVKQRLPKYYSWERCSKHHLNFLGQNRSYVRKKDDGCKAYWKVCLHYNLHKAQPAERFFDPNQRGKALHQKQALRKSQRSQTGEKLYKCTECGKVFIQKANLVVHQRTHTGEKPYECCECAKAFSQKSTLIAHQRTHTGEKPYECSECGKTFIQKSTLIKHQRTHTGEKPFVCDKCPKAFKSSYHLIRHEKTHIRQAFYKGIKCTTSSLIYQRIHTSEKPQCSEHGKASDEKPSPTKHWRTHTKENIYECSKCGKSFRGKSHLSVHQRIHTGEKPYECSICGKTFSGKSHLSVHHRTHTGEKPYECRRCGKAFGEKSTLIVHQRMHTGEKPYKCNECGKAFSEKSPLIKHQRIHTGERPYECTDCKKAFSRKSTLIKHQRIHTGEKPYKCSECGKAFSVKSTLIVHHRTHTGEKPYECRDCGKAFSGKSTLIKHQRSHTGDKNL

SEQ ID NO: 16338 - protein, 568 aa, Homo Sapiens
MGLLTFRDVAIEFSLEEWQCLDTAQRNLYKNVILENYRNLVFLGIAVSKQDLITCLEQEKEPLTVKRHEMVNEPPVMCSHFAQEFWPEQNIKDSFEKVTLRRYEKCGNDNFQLKGCKSVDECKLHKGGYNGLNQCLPTMQSKMFQCDKYVKVFNKFSHSDRHKIKHMENKPFKCKECGRSFCMLSHLTRHERNYTKVNFCKCEECEKAVNQSSKLTKHKRIYTCEKLYKCQECDRTFNQFSNLTEYKKDYAREKPYKCEECGKAFNQSSHLTTHKIIHTGEKPYKCEECGKAFNQFSNLTTHKKIHTGEQPYICEECGKAFTQSSTLTTHKRIHTGEKPYKCEECGKAFNRSSKLTEHKNIHTGEQPYKCEECGKAFNRSSNLTEHRKIHTEEKPYKCKECGKAFKHSSALTTHKRIHTGEKPYKCEECGKAFNRSSKLTEHKKLHTGKKPYKCEECGKAFIQSSKLTEHKKIHSGEIPYKCEECGKAFKHSSSLTTHKRIHTGEKPYKCEECGKAFSRSSKLTEHKIIHTGEKPYKCERCDKAFNQSANLTKHKKIHTGEKLQNWNV

SEQ ID NO: 16339 - protein, 588 aa, Homo Sapiens
MLENYRNLVFLGIAAFKPDLIIFLEQGKEPWNMKRHEMVEEPPVICSHFSQEFWPEQGIEDSFQKMILRRYDKCGHENLHLKISCTNVDECNVHKEGYNKLNQSLTTTQSKVFQCGKYANVFHKCSNSNRHKIRHTGEKGLKCKEYVRSFCMLSHLSQHERIYTRENSYKCEENGKAFNWSSTLTYYKSIHTGEKPYKCEECGKAFSKFSILTKHKVIHTGEKPYKCEECGKAFNRSSILTKHKIIHTGEKPYKCEECGKGFSSVSTLNTHKAIHAEEKPYKCEECGKASNSSSKLMEHKRIHTGEKPYKCEECGKAFSWSSSLTEHKRIHAGEKPYKCEECGKAFNRSSILTKHKIIHTGEKPYKCEGCGKAFSKVSTLNTHKAIHAEEKPYKCEECGKASNSSSKLMEHKRIHTGEKPYKCEECGKAFSWSSSLTEHKRIHAGEKPYKCEECGKAFTWSSSFTKHKRIHAAEKPYKCEECGKGFSTFSILTKHKIIHTGEKRYKCEECGKAFSWSSILTEHKIIHTGEKPYKCEECGKAFSRSSSLTRHKRIHTGEKPYKCEECGKAFKSSSTVSYHKKIHTGENP

SEQ ID NO: 16340 - protein, 584 aa, Homo Sapiens
MALSQGLFTFKDVAIEFSQEEWECLDPAQRALYRDVMLENYRNLLSLDEDNIPPEDDISVGFTSKGLSPKENNKEELYHLVILERKESHGINNFDLKEVWENMPKFDSLWDYDVKNYKGMPLTCNKNLTHRKDQQHNKSSIHFSLKQSVSIRDSAHQYFIHDKPFIRNLLKLKNNIRYAGNKYVKCFENKIGLSLQAQLAELQRFQTGEKMYECNPVEKSINSSSVSPLPPCVKNICNKYRKILKYPLLHTQYGRTHIREKSYKCNDCGKAFSKSSNLTNHQRIHSGQRPYKCNECGKAFNQCSNLTRHQRVHTGEKPYQCNICGKVCSQNSNLASHQRMHTGEKPYKCNECGKAFIQRSHLWGHERIHTGEKPYKCNECDKAFAERSSLTQHKRIHTGEKPYICNECGKAFKQCSHLTRHQNIHPGEKPHKCNVCGRAFIQSSSLVEHQRIHTGEKPYKCNKCDKAFIKRSHLWGHQRTHTGEKPYKCTECGKAFTERSNLTQHKKIHTGEKPYKCTECGKAFTQFANLTRHQKIHIEKKHCKHNIHGNALFQSSNLGDHQKSYNREKHIKYNETKIKYSSCT

SEQ ID NO: 16341 - protein, 525 aa, Homo Sapiens
MGTISLCIGVCAFEGANTSTSFYKLVYTAILSYSIQDLLPEQDMKDLCQKVTLTRHRSWGLDNLHLVKDWRTVNEGKGQKEYCNRLTQCSSTKSKIFQCIECGRNFSWRSILTEHKRIHTGEKPYKCEECGKVFNRCSNLTKHKRIHTGEKPYKCDECGKVFNWWSQLTNHKKIHTGEKPYKCDECDKVFNWWSQLTSHKKIHSGEKPYPCEECGKAFTQFSNLTQHKRIHTGEKPYKCKECCKAFNKFSNLTQHKRIHTGEKPYKCEECGNVFNECSHLTRHRRIHTGEKPYKCEECGKAFTQFASLTRHKRIHTGEKPYQCEECGKTFNRCSHLSSHKRIHTGEKPYKCEECGRTFTQFSNLTQHKRIHTGEKPYKCKECGKAFNKFSSLTQHRRIHTGVKPYKCEECGKVFKQCSHLTSHKRIHTGEKPYKCKECGKAFYQSSILSKHKRIHTEEKPYKCEECGKAFNQFSSLTRHKRIHTGEKRYKCKECGKGFYQSSIHSKYKRIYTGEEPDKCKKCGSL

SEQ ID NO: 16342 - protein, 411 aa, Homo Sapiens
MAKRPGSPGSREMGLLTFRDVVIEFSLEEWQCLDHAQQNLYRDVMLENYRNLVSLGIAVSKPDLITCLEQNKEPWNIKRNEMVTKHPVMCSHFTQDLPPELGIKDSLQKVIPRRYGKSGHDNLQVKTCKSMGECEVQKGGCNEVNQCLSTTQNKIFQTHKCVKVFGKFSNSNRHKTRHTGKKHFKCKKYGKSFCMVSQLHQHQIIHTRENSYQCEECGKPFNCSSTLSKHKRIHTGEKPYRCEECGKAFTWSSTLTKHRRIHTGEKPYTCEECGQAFSRSSTLANHKRIHTGEKPYTCEECGKAFSLSSSLTYHKRIHTGEKPYTCEECGKAFNCSSTLKKHKIIHTGEKPYKCKECGKAFAFSSTLNTHKRIHTGEEPYKCEECDKAFKWSSSLANHKSMHTGEKPYKCE

SEQ ID NO: 16343 - protein, 530 aa, Homo Sapiens
MPGPPGSLEMGPLTFRDVAIEFSLEEWQCLDTAQRNLYRKVMFENYRNLVFLGIAVSKPHLITCLEQGKEPWNRKRQEMVAKPPVIYSHFTEDLWPEHSIKDSFQKVILRGYGKCGHENLQLRISCKSVDESKVFKEGYNELNQCLRTTQSKIFQCDKYVKVFHKFSNSNSHKKRNTGKKVFKCKECGKSFCMLSHLTQHIRIHTRENSYKCEECGKVLNWFSELIKHKGIHMGEKPYKCEECGKAFNQSSTLIKHKKIHIEEKPFKCEECGKAFSLFSILSKHKIIHTGDKPYKCDECHKAFNWFATLTNHKRIHTGEKPFKCEECGKDFNQFSNLTKHKKIHTGEKPYKCEECGKAFNQFANLTRHKKIHTGEKSYKCEECGKAFIQSSNLTEHMRIHTGEKPYKCEECGKAFNGCSSLTRHKRIHTRENTYKCEECGKGFTLFSTLTNHKVIHTGEKSYKCDECGNVFNWPATLANHKRIHAREKPYKCEECGKAFNRSSHLTRHKKIHTGEKLYKPEKCDNNFDNT

SEQ ID NO: 16344 - protein, 645 aa, Homo Sapiens
MEPLKFRDVAIEFSLEEWQCLDTIQQNLYRNVMLENYRNLVFLGIVVSKPDLITCLEQEKEPWTRKRHRMVAEPPVICSHFAQDFSPEQNIKDSFQKVTPRRYGKCEHENLQLSKSVDECKVQKGGYNGLNQCLPTTQSKIFQCDKYMKIFHKFSNLNGHKVRHTRKKPFKYKEFGKSFCIFSNLTQHKIICTRVNFYKCEDCGKAFNGSSIFTKHKRIHIGEKSYICEECGKACNQFTNLTTHKIIYTRDKLYKREECSKAFNLSSHITTHTIIHTGENPYKREECDKAFNQSLTLTTHKIIHTREKLNEYKECGKAFNQSSHLTRHKIIHTGEKPYKCEECGKAFNQSSHLTRHKIIHTGEKPYRCEECGKAFRQSSHLTTHKIIHTGEKPYKCEECGKAFNKSSHLTRHKSIHTGEKPYQCEKCGKASNQSSNLTEHKNIHTEEKPYKCEECGKAFNQFSNLTTHKRIHTGEKPYKCEECGKAFNQSSILTTHKRIHTGEKSYKCEECGKAFYRSSKLTEHKKIHTGEKPYTCEECGKAFNHSSHLATHKVIHTGEKPYQCEECGKAFNQSSHLTRHKRIHTGEKPYQCEKCGKAFNQSSNLTGHKKIHTGEKLYKPKRCNSDFENTSKFSKHKRNYAGEKS

SEQ ID NO: 16345 - protein, 498 aa, Homo Sapiens
MELLTFRDVTIEFSLEEWEFLNPAQQSLYRKVMLENYRNLVSLGLTVSKPELISRLEQRQEPWNVKRHETIAKPPAMSSHYTEDLLPEQCMQDSFQKVILRRYGSCGLEDLHLRKDGENVGECKDQKEIYNGLNQCLSTLPSKIFPYNKCVKVFSKSSNLNRENIRHTTEKLFKCMQCGKVFKSHSGLSYHKIIHTEEKLCICEECGKTFKWFSYLTKHKRIHTGEKPYKCEECGKAFNWCSSLTKHKRIHTGEKPYKCEECGKAFHWCSPFVRHKKIHTGEKPYTCEDCGRAFNRHSHLTKHKTIHTGKKPYKCKECGKAFNHCSLLTIHERTHTGEKPYKCEECGKAFNSSSILTEHKVIHSGEKPYKCEKCDKVFKRFSYLTKHKRIHTGEKPYKCEECGKAFNWSSILTEHKRIHTGEKPYNCEECGKAFNRCSHLTRHKKIHTAVKRYKCEECGKAFKRCSHLNEHKRVQRGEKSCKYKKCGEAFNHCSNLTT

SEQ ID NO: 16346 - protein, 524 aa, Homo Sapiens
MKEESAAQLGCCHRPMALGGTGGSLSPSLDFQLFRGDQVFSACRPLPDMVDAHGPSCASWLCPLPLAPGRSALLACLQDLDLNLCTPQPAPLGTDLQGLQEDALSMKHEPPGLQASSTDDKKFTVKYPQNKDKLGKQPERAGEGAPCPAFSSHNSSSPPPLQNRKSPSPLAFCPCPPVNSISKELPFLLHAFYPGYPLLLPPPHLFTYGALPSDQCPHLLMLPQDPSYPTMAMPSLLMMVNELGHPSARWETLLPYPGAFQASGQALPSQARNPGAGAAPTDSPGLERGGMASPAKRVPLSSQTGTAALPYPLKKKNGKILYECNICGKSFGQLSNLKVHLRVHSGERPFQCALCQKSFTQLAHLQKHHLVHTGERPHKCSIPWVPGRNHWKSFQAWREREVCHKRFSSSSNLKTHLRLHSGARPFQCSVCRSRFTQHIHLKLHHRLHAPQPCGLVHTQLPLASLACLAQWHQGALDLMAVASEKHMGYDIDEVKVSSTSQGKARAVSLSSAGTPLVMGQDQNN

SEQ ID NO: 16347 - protein, 378 aa, Homo Sapiens
MISFQESVTFQDVAVDFTAEEWQLLDCAERTLYWDVMLENYRNLISVGCPITKTKVILKVEQGQEPWMVEGANPHESSPESDYPLVDEPGKHRESKDNFLKSVLLTFNKILTMERIHHYNMSTSLNPMRKKSYKSFEKCLPPNLDLLKYNRSYTVENAYECSECGKAFKKKFHFIRHEKNHTRKKPFECNDCGKAYSRKAHLATHQKIHNGERPFVCNDCGKAFMHKAQLVVHQRLHTGEKPYECSQCGKTFTWNSSFNQHVKSHTLEKSFECKECGKTFRYSSSLYKHSRFHTGEKPYQCIICGKAFGNTSVLVTHQRIHTGEKPYSCIECGKAFIKKSHLLRHQITHTGEKPYECNRCGKAFSQKSNLIVHQKIHT

SEQ ID NO: 16348 - protein, 1237 aa, Homo Sapiens
MGDMKTPDFDDLLAAFDIPDIDANEAIHSGPEENEGPGGPGKPEPGVGSESEDTAAASAGDGPGVPAQASDHGLPPPDISVVSVIVKNTVCPEQSEALAGGSAGDGAQAAGVTKEGPVGPHRMQNGFGSPEPSLPGTPHSPAPPSGGTWKEKGMEGKTPLDLFAHFGPEPGDHSDPLPPSAPSPTREGALTPPPFPSSFELAQENGPGMQPPVSSPPLGALKQESCSPHHPQVLAQQGSGSSPKATDIPASASPPPVAGVPFFKQSPGHQSPLASPKVPVCQPLKEEDDDEGPVDKSSPGSPQSPSSGAEAADEDSNDSPASSSSRPLKVRIKTIKTSCGNITRTVTQVPSDPDPPAPLAEGAFLAEASLLKLSPATPTSEGPKVVSVQLGDGTRLKGTVLPVATIQNASTAMLMAASVARKAVVLPGGTATSPKMIAKNVLGLVPQALPKADGRAGLGTGGQKVNGASVVMVQPSKTATGPSTGGGTVISRTQSSLVEAFNKILNSKNLLPAYRPNLSPPAEAGLALPPTGYRCLECGDAFSLEKSLARHYDRRSMRIEVTCNHCARRLVFFNKCSLLLHAREHKDKGLVMQCSHLVMRPVALDQMVGQPDITPLLPVAVPPVSGPLALPALGKGEGAITSSAITTVAAEAPVLPLSTEPPAAPATSAYTCFRCLECKEQCRDKAGMAAHFQQLGPPAPGATSNVCPTCPMMLPNRCSFSAHQRMHKNRPPHVCPECGGNFLQANFQTHLREACLHVSRRVGYRCPSCSVVFGGVNSIKSHIQTSHCEVFHKCPICPMAFKSGPSAHAHLYSQHPSFQTQQAKLIYKCAMCDTVFTHKPLLSSHFDQHLLPQRVSVFKCPSCPLLFAQKRTMLEHLKNTHQSGRLEETAGKGAGGALLTPKTEPEELAVSQGGAAPATEESSSSSEEEEVPSSPEPPRPAKRPRRELGSKGLKGGGGGPGGWTCGLCHSWFPERDEYVAHMKKEHGKSVKKFPCRLCERSFCSAPSLRRHVRVNHEGIKRVYPCRYCTEGKRTFSSRLILEKHVQVRHGLQLGAQSPGRGTTLARGSSARAQGPGRKRRQSSDSCSEEPDSTTPPAKSPRGGPGSGGHGPLRYRSSSSTEQSLMMGLRVEDGAQQCLDCGLCFASPGSLSRHRFISHKKRRGVGKASALGLGDGEEEAPPSRSDPDGGDSPLPASGGPLTCKVCGKSCDSPLNLKTHFRTHGMAFIRARQGAVGDN

SEQ ID NO: 16349 - protein, 276 aa, Homo Sapiens
MAPPPAPLLAPRPGETRPGCRKPGTVSFADVAVYFSPEEWGCLRPAQRALYRDVMQETYGHLGALGFPGPKPALISWMEQESEAWSPAAQDPEKGERLGGARRGDVPNRKEEEPEEVPRAKGPRKAPVKESPEVLVERNPDPAISVAPARAQPPKNAAWDPTTGAQPPAPIPSMDAQAGQRRHVCTDCGRRFTYPSLLVSHRRMHSGERPFPCPECGMRFKRKFAVEAHQWIHRSCSGGRRGRRPGIRAVPRAPVRGDRDPPVLFRHYPDIFEECG

SEQ ID NO: 16350 - protein, 500 aa, Homo Sapiens
MAPPSAPLPAQGPGKARPSRKRGRRPRALKFVDVAVYFSPEEWGCLRPAQRALYRDVMRETYGHLGALGCAGPKPALISWLERNTDDWEPAALDPQEYPRGLTVQRKSRTRKKNGEKEVFPPKEAPRKGKRGRRPSKPRLIPRQTSGGPICPDCGCTFPDHQALESHKCAQNLKKPYPCPDCGRRFSYPSLLVSHRRAHSGECPYVCDQCGKRFSQRKNLSQHQVIHTGEKPYHCPDCGRCFRRSRSLANHRTTHTGEKPHQCPSCGRRFAYPSLLAIHQRTHTGEKPYTCLECNRRFRQRTALVIHQRIHTGEKPYPCPDCERRFSSSSRLVSHRRVHSGERPYACEHCEARFSQRSTLLQHQLLHTGEKPYPCPDCGRAFRRSGSLAIHRSTHTEEKLHACDDCGRRFAYPSLLASHRRVHSGERPYACDLCSKRFAQWSHLAQHQLLHTGEKPFPCLECGRCFRQRWSLAVHKCSPKAPNCSPRSAIGGSSQRGNAH

SEQ ID NO: 16351 - protein, 566 aa, Homo Sapiens
MPCCSHRRCREDPGTSESQEMDPVAFDDVAVNFTQEEWALLDISQRKLYKEVMLETFRNLTSVGKSWKDQNIEYEYQNPRRNFRSLIEKKVNEIKDDSHCGETFTQVPDDRLNFQEKKASPEIKSCDSFVCGEVGLGNSSFNMNIRGDIGHKAYEYQEYGPKPCKCQQPKKAFRYHPSFRTPQRDHTGEKPYACKECGKTFISHSSIQRHVVMHSGDGPYKCKFCGKAFHCLSLYLIHERIHTGEKPYECKQCGKSFSYSATLRIHERTHTGEKPYECQQCGKAFHSPRCYRRHERIHTGEKAYQCKECGKAFTCPQYVRIHERTHSRKKPYECTQCGKALSSLTSFQTHIRMHSGERPYECKICGKGFCSANSFQRHEKTHSGEKPYKCKQCGKAFIHSSSLRYHERIHTGEKPYECKQCGKAFRSSSHLQLHGRTHTGEKPYECQECGKAFRSMKNLQSHERTQTHVRIHSGERPYKCKLCGKGFYCPKSLQRHEKTHTGEKLYECKQCGEAFSSSSSFRYHERTHTGEKPYKCKQCGKAFRAASVLRMHGRTHPEDKPYECKQ

SEQ ID NO: 16352 - protein, 312 aa, Homo Sapiens
MSLCSPTHSAEMSLFLQGPEEMLPLSSEGSEMGSEKEQSPEPHLPEEGEGGKPWRVDDSEGSWIPPGEKEHGQESLSDELQETHPKKPWQKVTVRARELGDPIAHPRHEADEKPFICAQCGKTFNNTSNLRTHQRIHTGEKPYKCSECGKSFSRSSNRIRHERIHLEEKHYKCPKCQESFRRRSDLTTHQQDHLGKRPYRCDICGKSFSQSATLAVHHRTHLEPAPYICCECGKSFSNSSSFGVHHRTHTGERPYECTECGRTFSDISNFGAHQRTHRGEKPYRCTVCGKHFSRSSNLKPFIPLWRMVLYSL

SEQ ID NO: 16353 - protein, 519 aa, Homo Sapiens
MASSPAVDVSCRRREKRRQLDARRSKCRIRLGGHMEQWCLLKERLGFSLHSQLAKFLLDRYTSSGCVLCAGPEPLPPKGLQYLVLLSHAHSRECSLVPGLRGPGGQDGGLVWECSAGHTFSWGPSLSPTPSEAPKPASLPHTTRRSWCSEATSGQELADLESEHDERTQEARLPRRVGPPPETFPPPGEEEGEEEEDNDEDEEEMLSDASLWTYSSSPDDSEPDAPRLLPSPVTCTPKEGETPPAPAALSSPLAVPALSASSLSSRAPPPAEVRVQPQLSRTPQAAQQTEALASTGSQAQSAPTPAWDEDTAQIGPKRIRKAAKRELMPCDFPGCGRIFSNRQYLNHHKKYQHIHQKSFSCPEPACGKSFNFKKHLKEHMKLHSDTRDYICEFCARSFRTSSNLVIHRRIHTGEKPLQCEICGFTCRQKASLNWHQRKHAETVAALRFPCEFCGKRFEKPDSVAAHRSKSHPALLLAPQESPSGPLEPCPSISAPGPLGSSEGSRPSASPQAPTLLPQQ

SEQ ID NO: 16354 - protein, 515 aa, Homo Sapiens
MGLLAFRDVALEFSPEEWECLDPAQRSLYRDVMLENYRNLISLGEDSFNMQFLFHSLAMSKPELIICLEARKEPWNVNTEKTARHSVLSSYLTEDILPEQGLQVSFQKVMLRRYERCCLEKLRLRNDWEIVGEWKGQKASYNGLDLCSATTHSKNFQCNKCVKGFSKFANLNKCKISHTGEKPFKCKECGNVSCMSLIMTQQQRIHIGENPYQCKKCGKAFNECSCFTDCKRIHVGEKHCKCEECNNIFKSCSSLAVVEKNHTEKKTYRCEECGKAFNLCSVLTKHKKIHTGEKPYKCEECGKSFKLFPYLTQHKRIHSREKPYKCEECGKVFKLLSYLTQHRRIHTGEKTFRCEECGKAFNQSSHLTEHRRIHTGEKPYKCEECGKAFTWFSYLIQHKRIHTGQKPYKCEECGKAFTWFSYLTQHKRIHTGEKPYKCDECGKAFNWFSYLTNHKRIHTGEKPYKCEECGKAFGQSSHLSKHKTIHTREKPYKCEECGKAFNHSAQLAVHEKTHT

SEQ ID NO: 16355 - protein, 374 aa, Homo Sapiens
MEPGGEPTGAKESSTLMESLAAVKAAFLAQAPSGSRSAEVQAAQSTEPAAEAGAPEGEGHRGGPPRALGSLGLCENQEARERPGGSPRGPVTSEKTGGQSGLESDVPPNAGPGAEGGGSWKGRPFPCGACGRSFKCSSDAAKHRSIHSGEKPYECSDCGKAFIHSSHVVRHQRAHSGERPYACAECGKAFGQSFNLLRHQRVHTGEKPYACADCGKAFGQRSDAAKHRRTHTGERLYACGECGKRFLHSSNVVRHRRTHHGENPYECRECGQAFSQSSNLLQHQRVHTGERPFACQDCGRAFSRSSFLREHRRIHTGEKPHQCGHCGRAFRALSGFFRHQRLHTGEKPFRCTECGRAFRLSFHLIQHRRVHGAE

SEQ ID NO: 16356 - protein, 545 aa, Homo Sapiens
MKQEDNQGVCAHQDSEDKGMGSDFEDSEDREGDPEEREMGSNPHDTNKREGHPEPEMGSNPQDSRHREAVPDICTEGQLSEEEGVSVRGEEDDQSGVADMAMFPGLSESDSISRSLREDDDESAGENRLEEEEEQPAPPVLPWRRHLSLGSRHRGDKPAHRRFHRLHHPMAVDLGELDSLVASIMDAPTICPDCGESFSPGAAFLQHQRIHRLAEAAAAASLEPFGLAGECDAMVGMMGVGVAGGFGAGPPLARPPREKPFRCGECGKGFSRNTYLTNHLRLHTGERPNLCADCGKSFSWRADLLKHRRLHTGEKPYPCPECGEAFSLSSHLLSHRRAHAAASGAGAAALRPFACGECGKGFVRRSHLANHQRIHTGEKPHGCGECGKRFSWRSDLVKHQRVHTGEKPYMCSECGETFSVSSHLFTHKRTHSGERPYVCRECGKGFGRNSHLVNHLRVHTGEKPFRCGQCEKRFSDFSTLTQHQRTHTGEKPYTCIECGKSFIQSSHLIRHRRIHTGNKPHKCAGCGKGFRYKTHLAQHQKLHLC

SEQ ID NO: 16357 - protein, 642 aa, Homo Sapiens
MEEERKTAELQKNRIQDSVVFEDVAVDFTQEEWALLDLAQRNLYRDVMLENFQNLASLGYPLHTPHLISQWEQEEDLQTVKRELIQGIFMGEHREGFETQLKTNESVASQDICGEKISNEQKIVRFKRNDSWFSSLHENQESCGIDYQNKSHERHLRNHMVENIYECYEENQDGQTFSQVPNLDSLKRNTEVKSCECHECGKAFVDHSSLKSHIRSHTGSKPYQCKECGKAFHFLACFKKHMKTPTEEKPYECKECTKAFSCSSFFRAHMKIHIGKTNYECKECGKGFSCSSSLTEHKRIHSGDKPYECKECGKAFSCSSSLSKHKRIHSGDKPYECKECGKAFSSSSHLIIHIRIHTGEKPYECKECGKAFSESSKLTVHGRTHTGEKPYKCKECGKAYNCPSSLSIHMRKHTGEKPYECLECGKAFYLPTSLNTHVKNQSREKPYECKECGKAFSCPSSFRAHVRDHTGKIQYECKECGKTFSRSSSLTEHLRTHSGEKPYECKECGKAFISSSHLTVHIRTHTGEKPYECKKCGKAFIYPSALRIHMRTHTGEKPYECKECGKAFRHSSYLTVHARMHTGEKPFECLECGKAFSCPSSFRRHVRSHTGEKPYECKECGKAFVCPAYFRRHVKTHTRENI

SEQ ID NO: 16358 - protein, 686 aa, Homo Sapiens
MEVVTFGDVAVHFSREEWQCLDPGQRALYREVMLENHSSVAGLAGFLVFKPELISRLEQGEEPWVLDLQGAEGTEAPRTSKTDSTIRTENEQACEDMDILKSESYGTVVRISPQDFPQNPGFGDVSDSEVWLDSHLGSPGLKVTGFTFQNNCLNEETVVPKTFTKDAPQGCKELGSSGLDCQPLESQGESAEGMSQRCEECGKGIRATSDIALHWEINTQKISRCQECQKKLSDCLQGKHTNNCHGEKPYECAECGKVFRLCSQLNQHQRIHTGEKPFKCTECGKAFRLSSKLIQHQRIHTGEKPYRCEECGKAFGQSSSLIHHQRIHTGERPYGCRECGKAFSQQSQLVRHQRTHTGERPYPCKECGKAFSQSSTLAQHQRMHTGEKAQILKASDSPSLVAHQRIHAVEKPFKCDECGKAFRWISRLSQHQLIHTGEKPYKCNKCTKAFGCSSRLIRHQRTHTGEKPFKCDECGKGFVQGSHLIQHQRIHTGEKPYVCNDCGKAFSQSSSLIYHQRIHKGEKPYECLQCGKAFSMSTQLTIHQRVHTGERPYKCNECGKAFSQNSTLFQHQIIHAGVKPYECSECGKAFSRSSYLIEHQRIHTRAQWFYEYGNALEGSTFVSRKKVNTIKKLHQCEDCEKIFRWRSHLIIHQRIHTGEKPYKCNDCGKAFNRSSRLTQHQKIHMG

SEQ ID NO: 16359 - protein, 446 aa, Homo Sapiens
MEVPPATKFGETFAFENRLESQQGLFPGEDLGDPFLQERGLEQMAVIYKEIPLGEQDEENDDYEGNFSLCSSPVQHQSIPPGTRPQDDELFGQTFLQKSDLSMCQIIHSEEPSPCDCAETDRGDSGPNAPHRTPQPAKPYACRECGKAFSQSSHLLRHLVIHTGEKPYECCECGKAFSQSSHLLRHQIIHTGEKPYECRECGKAFRQSSALTQHQKIHTGKRPYECRECGKDFSRSSSLRKHERIHTGERPYQCKECGKSFNQSSGLSQHRKIHTLKKPHECDLCGKAFCHRSHLIRHQRIHTGKKPYKCDECGKAFSQSSNLIEHRKTHTGEKPYKCQKCGKAFSQSSSLIEHQRIHTGEKPYECCQCGKAFCHSSALIQHQRIHTGKKPYTCECGKAFRHRSALIEHYKTHTREKPYVCNLCGKSFRGSSHLIRHQKIHSGEKL

SEQ ID NO: 16360 - protein, 531 aa, Homo Sapiens
MGFLHVGQDGLELPTSGDPPASASQSAGITGVSHRTQPPCFEGLTSKDLVREEKTRKRKRKAKESGMALLQGLLTFRDVAIEFSQEEWKCLDPAQRTLYRDVMLENYRNLVSLDTSSKCMMKMFSSTGQGNTEVVHTGTLQIHASHHIGDTCFQEIEKDIHDFVFQWQENETNGHEALMTKTKKLMSSTERHDQRHAGNKPIKNELGSSFHSHLPEVHIFHPEGKIGNQVEKAINDAFSVSASQRISCRPKTRISNKYRNNFLQSSLLTQKREVHTREKSFQRNESGKAFNGSSLLKKHQIIHLGDKQYKCDVCGKDFHQKRYLACHRCHTGENPYTCNECGKTFSHNSALLVHKAIHTGEKPYKCNECGKVFNQQSNLARHHRVHTGEKPYKCEECDKVFSRKSHLERHRRIHTGEKPYKCKVCDKAFRRDSHLAQHTVIHTGEKPYKCNECGKTFVQNSSLVMHKVIHTGEKRYKCNECGKVFNHKSNLACHRRLHTGEKPYKCNECGKVFNRKSNLERHHRLHTGKKS

SEQ ID NO: 16361 - protein, 129 aa, Homo Sapiens
MREKSFQCNESGKAFNCSSLLKKCQIIHLGEKKYKCDICGKVFNQKRYLAYHHRCHTGEKPYKCNQCGKTFSYKSSLVIHKAIHTGEKPHKCNECGKVFNQKAYLASHHRLHTGEKPYKCEECDKVFSR

SEQ ID NO: 16362 - protein, 590 aa, Homo Sapiens
MSDSPAGSNPRTPESSGSGSGGGGKRPAVPAAVSLLPPADPLRQANRLPIRVLKMLSAHTGHLLHPEYLQPLSSTPVSPIELDAKKSPLALLAQTCSQIGKPDPPPSSKLNSVAAAANGLGAEKDPGRSAPGAASAAAALKQLGDSPAEDKSSFKPYSKGSGGGDSRKDSGSSSVSSTSSSSSSSPGDKAGFRVPSAACPPFPPHGAPVSASSSSSSPGGSRGGSPHHSDCKNGGGVGGGELDKKDQEPKPSPEPAAVSRGGGGEPGAHGGAESGASGRKSEPPSALVGAGHVAPVSPYKPGHSVFPLPPSSIGYHGSIVGAYAGYPSQFVPGLDPSKSGLVGGQLSGGLGLPPGKPPSSSPLTGASPPSFLQGLCRDPYCLGGYHGASHLGGSSCSTCSAHDPAGPSLKAGGYPLVYPGHPLQPAALSSSAAQAALPGHPLYTYGFMLQNEPLPHSCNWVAASGPCDKRFATSEELLSHLRTHTALPGAEKLLAAYPGASGLGSAAAAAAAAASCHLHLPPPAAPGSPGSLSLRNPHTLGLSRYHPYGKSHLSTAGGLAVPSLPTAGPYYSPYALYGQRLASASALGYQ

SEQ ID NO: 16363 - protein, 412 aa, Homo Sapiens
MTFTFQSEDLKRDCGKKMSHQHVFSLAMEEDVKTADTKKASRILDHEKENTRSICLLEQKRKVVSSNIDVPPARKSSEELDMDKVTAAMVLTSLSTSPLVRSPPVRPNESLSGSWKEGGCVPSSTSSSGYWSWSAPSDQSNPSTPSPPLSADSFKPFRSPAQPDDGIDEAEASNLLFDEPIPRKRKNSMKVMFKCLWKNCGKVLSTAAGIQKHIRTIHLGRVGDSDYSDGEEDFYYTEIKLNTDSVADGLSSLAPVSPSQSLASPPTFPIPDSSRTETPCAKTETKLMTPLSRSAPTTLYLVHTDHAYQATPPVTIPGSAKFTPNGSSFSISWQSPPVTFTGIPVSPTHHPVGTGEQRQHAHTVLSSPPRGTVSLRKPRGEGKKCRKVYGMENRDMWCTACRWKKACQRFLD

SEQ ID NO: 16364 - protein, 300 aa, Homo Sapiens
MHSLKKVTFEDVAIDFTQEEWAMMDTSKRKLYRDVMLENISHLVSLGYQISKSYIILQLEQGKELWREGREFLQDQNPDRESALKKKHMISMHPITRKDASTSMTMENSLILEDPFECNDSGEDCTHSSTITQRLLTHSGKKPYVSKQCGKSLRNLFSPKPHKQIHTKGKSYQCNLCEKAYTNCFRLRRHKMTHTGERPYACHLCGKAFTQCSHLRRHEKTHTGERPYKCHQCGKAFIQSFNLRRHERTHLGKKCYECDKSGKAFSQSSGFRGNKIIHTGEKPHACLLCGKAFSLSSDLR

SEQ ID NO: 16365 - protein, 300 aa, Homo Sapiens
MHSLEKVTFEDVAIDFTQEEWDMMDTSKRKLYRDVMLENISHLVSLGYQISKSYIILQLEQGKELWREGRVFLQDQNPDRESALKKKHMISMHPIIRKDASTSMTMENSLILEDPFEYNDSGEDCTHSSTITQCLLTHSGKKPCVSKQCGKSLRNLLSPKPRKQIHTKGKSYQCNLCEKAYTNCFYLRRHKMTHTGERPYACHLCGKAFTQCSHLRRHEKTHTGERPYKCHQCGKAFIQSFNLRRHERTHLGQKCYECDKSGKAFSQSSGFRGNKIIHIGEKPHACLLCGKAFSLSSDLR

SEQ ID NO: 16366 - protein, 300 aa, Homo Sapiens
MHSLKKVTFEDVAIDFTQEEWAMMDTSKRKLYRDVMLENISHLVSLGYQISKSYIILQLEQGKELWQEGREFLQDQNPDRESALKKTHMISMHPIIRKDAPTSMTMENSLILEDPFECNDSGEDCTHSSTIIQCLLTHSGKKPYVSKQCGKSLSNLLSPKPHKQIHTKGKSYQCNLCEKAYTNCFHLRRPKMTHTGERPYTCHLCRKAFTQCSHLRRHEKTHTGERPYKCHQCGKAFIQSFNLRRHERTHLGEKWYECDNSGKAFSQSSGFRGNKIIHTGEKPHACLLCGKAFSLSSDLR

SEQ ID NO: 16367 - protein, 300 aa, Homo Sapiens
MHSLKKLTFEDVAIDFTQEEWAMMDTSKRKLYRDVMLENISHLVSLGYQISKSYIILQLEQGKELWREGRVFLQDQNPNRESALKKTHMISMHPITRKDASTSMTMENSLILEDPFECNDSGEDCTRSSTITQCLLTHSGKKPYVSKQCGKSLRNLLSTEPHKQIHTKGKSYQCNLCEKAYTNCFHLRRHKMTHTGERPYACHLCRKAFTQCSHLRRHEKTHTGQRPYKCHQYGKVFIQSFNLQRHERTHLGKKCYECDKSGKAFSQSSGFRGNKIIHTGEKPHACLLCGKAFSLSSNLR

SEQ ID NO: 16368 - protein, 76 aa, Homo Sapiens
MARGQQKIQSQQKNAKKQAGQKKKQGHDQKAAAKAALIYTCTVCRTQMPDPKTFKQHFESKHPKTPLPPELADVQA

SEQ ID NO: 16369 - protein, 371 aa, Homo Sapiens
MDMAQEPVTFRDVAIYFSREEWACLEPSQRALYRDVMLDNFSSVAALGFCSPRPDLVSRLEQWEEPWVEDRERPEFQAVQRGPRPGARKSADPKRPCDHPAWAHKKTHVRRERAREGSSFRKGFRLDTDDGQLPRAAPERTDAKPTAFPCQVLTQRCGRRPGRRERRKQRAVELSFICGTCGKALSCHSRLLAHQTVHTGTKAFECPECGQTFRWASNLQRHQKNHTREKPFCCEACGQAFSLKDRLAQHRKVHTEHRPYSCGDCGKAFKQKSNLLRHQLVHTGERPFYCADCGKAFRTKENLSHHQRVHSGEKPYTCAECGKSFRWPKGFSIHRRLHLTKRFYECGHCGKGFRHLGFFTRHQRTHRHGEV

SEQ ID NO: 16370 - protein, 499 aa, Homo Sapiens
MKRHEMAAKPPAMCSHFAKDLRPEQYIKNSFQQVILRRYGKCGYQKGCKSVDEHKLHKGGHKGLNRCVTTTQSKIVQCDKYVKVFHKYSNAKRHKIRHTGKNPFKCKECGKSFCMLSQLTQHEIIHTGEKPYKCEECGKAFKKSSNLTNHKIIHTGEKPYKCEECGKAFNQSSTLTRHKIIHTGEKLYKCEECGKAFNRSSNLTKHKIVHTGEKPYKCEECGKAFKQSSNLTNHKKIHTGEKPYKCGECGKAFTLSSHLTTHKRIHTGEKPYKCEECGKAFSVFSTLTKHKIIHTEEKPYKCEECGKAFNRSSHLTNHKVIHTGEKPYKCEECGKAFTKSSTLTYHKVIHTGKKPYKCEECGKAFSIFSILTKHKVIHTEDKPYKCEECGKTFNYSSNFTNHKKIHTGEKPYKCEECGKSFILSSHLTTHKIIHTGEKPYKCKECGKAFNQSSTLMKHKIIHTGEKPYKCEECGKAFNQSPNLTKHKRIHTKEKPYKCK

SEQ ID NO: 16371 - protein, 641 aa, Homo Sapiens
MDSVVFEDVAVNFTQEEWALLGPSQKKLYRDVMQETFVNLASIGENWEEKNIEDHKNQGRKLRSHMVERLCERKEGSQFGETISQTPNPKPNKKTFTRVKPYECSVCGKDYMCHSSLNRHMRSHTEHRSYEYHKYGEKSYECKECGKRFSFRSSFRIHERTHTGEKPYKCKQCGKAFSWPSSFQIHERTHTGEKPYECKECGKAFIYHTTFRGHMRMHTGEKPYKCKECGKTFSHPSSFRNHERTHSGEKPYECKQCGKAFRYYQTFQIHERTHTGEKPYQCKQCGKALSCPTSFRSHERIHTGEKPYKCKKCGKAFSFPSSFRKHERIHTGEKPYDCKECGKAFISLPSYRRHMIMHTGNGPYKCKECGKAFDCPSSFQIHERTHTGEKPYECKQCGKAFSCSSSFRMHERTHTGEKPHECKQCGKAFSCSSSVRIHERTHTGEKPYECKQCGKAFSCSSSFRMHERIHTGEKPYECKQCGKAFSFSSSFRMHERTHTGEKPYECKQCGKAFSCSSSFRMHERTHTGEKPYECKQCGKAFSCSSSIRIHERTHTGEKPYECKQCGKAFSCSSSVRMHERTHTGVKPYECKQCDKAFSCSRSFRIHERTHTGEKPYACQQCGKAFKCSRSFRIHERVHSGE

SEQ ID NO: 16372 - protein, 489 aa, Homo Sapiens
MKELDPKNDISEDKLSVVGEATGGPTRNGARGPGSEGVWEPGSWPERPRGDAGAEWEPLGIPQGNKLLGGSVPACHELKAFANQGCVLVPPRLDDPTEKGACPPVRRGKNFSSTSDLSKPPMPCEEKKTYDCSECGKAFSRSSSLIKHQRIHTGEKPFECDTCGKHFIERSSLTIHQRVHTGEKPYACGDCGKAFSQRMNLTVHQRTHTGEKPYVCDVCGKAFRKTSSLTQHERIHTGEKPYACGDCGKAFSQNMHLIVHQRTHTGEKPYVCPECGRAFSQNMHLTEHQRTHTGEKPYACKECGKAFNKSSSLTLHQRNHTGEKPYVCGECGKAFSQSSYLIQHQRFHIGVKPFECSECGKAFSKNSSLTQHQRIHTGEKPYECYICKKHFTGRSSLIVHQIVHTGEKPYVCGECGKAFSQSAYLIEHQRIHTGEKPYRCGQCGKSFIKNSSLTVHQRIHTGEKPYRCGECGKTFSRNTNLTRHLRIHT

SEQ ID NO: 16373 - protein, 664 aa, Homo Sapiens
MEGFMDSGTQTDAVVVLSLAQAAVLGLVSENELFGATISAEAFYPDLGPELSGAAMGEPEPPGPDVYQLACNGRALEEPAEEEVLEVEAACEKHTRRKTRPPVRLVPKVKFEKVEEEEQEVYEVSVPGDDKDAGPAEAPAEAASGGCDALVQSSAVKMIDLSAFSRKPRTLRHLPRTPRPELNVAPYDPHFPAPARDGFPEPSMALPGPEALPTECGFEPPHLAPLSDPEAPSMESPEPVKPEQGFVWQEASEFEADTAGSTVERHKKAQLDRLDINVQIDDSYLVEAGDRQKRWQCRMCEKSYTSKYNLVTHILGHNGIKPHSCPHCSKLFKQPSHLQTHLLTHQGTRPHKCQVCHKAFTQTSHLKRHMLLHSEVKPYSCHFCGRGFAYPSELKAHEVKHESGRCHVCVECGLDFSTLTQLKRHLASHQGPTLYQCLECDKSFHYRSQLQNHMLKHQNVRPFVCTECGMEFSQIHHLKQHSLTHKGVKEFKCEVCGREFTLQANMKRHMLIHTSVRPYQCHICFKTFVQKQTLKTHMIVHSPVKPFKCKVCGKSFNRMYNLLGHMHLHAGSKPFKCPYCSSKFNLKGNLSRHMKVKHGVMDIGLDSQDPMMELTGTDPSELDGQQEMEDFEENAYSYASVDSSAEASVLTEQAMKEMAYYNVL

SEQ ID NO: 16374 - protein, 761 aa, Homo Sapiens
MDSGGGSLGLHTPDSRMAHTMIMQDFVAGMAGTAHIDGDHIVVSVPEAVLVSDVVTDDGITLDHGLAAEVVHGPDIITETDVVTEGVIVPEAVLEADVAIEEDLEEDDGDHILTSELITETVRVPEQVFVADLVTGPNGHLEHVVQDCVSGVDSPTMVSEEVLVTNSDTETVIQAAGGVPGSTVTIKTEDDDDDDVKSTSEDYLMISLDDVGEKLEHMGNTPLKIGSDGSQEDAKEDGFGSEVIKVYIFKAEAEDDVEIGGTEIVTESEYTSGHSVAGVLDQSRMQREKMVYMAVKDSSQEEDDIRDERRVSRRYEDCQASGNTLDSALESRSSTAAQYLQICDGINTNKVLKQKAKKRRRGETRQWQTAVIIGPDGQPLTVYPCHICTKKFKSRGFLKRHMKNHPDHLMRKKYQCTDCDFTTNKKVSFHNHLESHKLINKVDKTHEFTEYTRRYREASPLSSNKLILRDKEPKMHKCKYCDYETAEQGLLNRHLLAVHSKNFPHVCVECGKGFRHPSELKKHMRTHTGEKPYQCQYCIFRCADQSNLKTHIKSKHGNNLPYKCEHCPQAFGDERELQRHLDLFQGHKTHQCPHCDHKSTNSSDLKRHIISVHTKDFPHKCEVCDKGFHRPSELKKHSDIHKGRKIHQCRHCDFKTSDPFILSGHILSVHTKDQPLKCKRCKRGFRQQNELKKHMKTHTGRKIYQCEYCEYSTTDASGFKRHVISIHTKDYPHRCEFCKKGFRRPSEKNQHIMRHHKEALM

SEQ ID NO: 16375 - protein, 430 aa, Homo Sapiens
MEEEEMNDGSQMVRSQESLTFQDVAVDFTREEWDQLYPAQKNLYRDVMLENYRNLVALGYQLCKPEVIAQLELEEEWVIERDSLLDTHPDGENRPEIKKSTTSQNISDENQTHEMIMERLAGDSFWYSILGGLWDFDYHPEFNQENHKRYLGQVTLTHKKITQERSLECNKFAENCNLNSNLMQQRIPSIKIPLNSDTQGNSIKHNSDLIYYQGNYVRETPYEYSECGKIFNQHILLTDHIHTAEKPSECGKAFSHTSSLSQPQMLLTGEKPYKCDECGKRFSQRIHLIQHQRIHTGEKPFICNGCGKAFRQHSSFTQHLRIHTGEKPYKCNQCGKAFSRITSLTEHHRLHTGEKPYECGFCGKAFSQRTHLNQHERTHTGEKPYKCNECGKAFSQSAHLNQHRKIHTREKLCEYKCEQTVRHSPSFSST

SEQ ID NO: 16376 - protein, 554 aa, Homo Sapiens
MNVMLENYKNLVFLAGIAVSKQDPITSLEQEKEPWNMKICEMVDESPAMCSSFTRDLWPEQDIKDSFQQVILRRHGKCEHENLQLRKGSANVVECKVYKKGYELNQCLTTTQSKIFPCDKYIKVFHKIFNSNRHKTRHTGEKPFKCKKCDESFCMLLHLHQHKRIHIRENSYQCEECDKVFKRFSTLTRHKRVHTGEKPFKCEECGKAFKHSSTLTTHKMIHTGEKPYRCEECGKAFYHSSHLTTHKVIHTGEKPFKCEECGKAFNHPSALTTHKFIHVKEKPYKCEECDKAFNRFSYLTKHKIIHSGEKSYKCEQCGKGFNWSSTLTKHKRIHTGEKPYKCEECGKAFNVSSHLTTHKMIHTGEKPYKCEECGKAFNHSSKLTIHKIIHTGEKPYKCEECGKAFNQSSNLTKHKIIHTGEKLYKCEECGKAFNRSSNLTTHKRIHTGEKPYKCEECGKAFNRSSNLTKHNIIHTGEKSYKCEECGKAFNQSSTLTKHRKIQQGMVAHACNPNTLRGLGEQIARSGVQDQPGQHGKTPSLLKIQKFAGCGGRRL

SEQ ID NO: 16377 - protein, 495 aa, Homo Sapiens
MAKRPGPPGSREMGLLTFRDIAIEFSLAEWQCLDHAQQNLYRDVMLENYRNLVSLGIAVSKPDLITCLEQNKEPQNIKRNEMVAKHPVTCSHFTQDLQSEQGIKDSLQKVILRRYGKCGQEDLQVKKCCKSVGECEVHKGGYNYVNQCLSATQNKTFQTHKCVKVFGKFSNSNRHKTRHTGKKHFKCKNDGKSFCMLSRLNQHQIIHTREKSYKCEECGKSFNCSSTLTRHKRIHTGEKPYRCEECGKAFSWSASLTKHKRIHTGEKPYTCEERGKVFSRSTLTNYKRIHTGEKPYTCEECGKAFSRSSTLTNHKRIHTGERPYKCEECGKAFSLSSTLKKHKIVHTGEKLYTCEECGKAFTFSSTLNTHKRIHTGEKPYTCEECGKAFSLPSTFTYHKRTHTGEKPYKCEECGKAFNCSSTLKKHKIIHTGEKLYKCKECGKAFTFSSTLNTHKRIHTGEKPYKCEECDQTFKWHSSLANHKNMHTGEKPYKYE

SEQ ID NO: 16378 - protein, 904 aa, Homo Sapiens
MLETYNSLVSLQELVSFEEVAVHFTWEEWQDLDDAQRTLYRDVMLETYSSLVSLGHCITKPEMIFKLEQGAEPWIVEETPNLRLSAVQIIDDLIERSHESHDRFFWQIVITNSNTSTQERVELGKTFNLNSNHVLNLIINNGNSSGMKPGQFNDCQNMLFPIKPGETQSGEKPHVCDITRRSHRHHEHLTQHHKIQTLLQTFQCNEQGKTFNTEAMFFIHKRVHIVQTFGKYNEYEKACNNSAVIVQVITQVGQPTCCRKSDFTKHQQTHTGEKPYECVECEKPSISKSDLMLQCKMPTEEKPYACNWCEKLFSYKSSLIIHQRIHTGEKPYGCNECGKTFRRKSFLTLHERTHTGDKPYKCIECGKTFHCKSLLTLHHRTHSGEKPYQCSECGKTFSQKSYLTIHHRTHTGEKPYACDHCEEAFSHKSRLTVHQRTHTGEKPYECNECGKPFINKSNLRLHQRTHTGEKPYECNECGKTFHRKSFLTIHQWTHTGEKPYECNECGKTFRCKSFLTVHQRTHAGEKPYACNECGKTYSHKSYLTVHHRTHTGEKPYECNECGKSFHCKSFLTIHQRTHAGKKPYECNECEKTFINKLNLGIHKITHTGERPYECNECGKTFRQKSNLSTHQGTHTGEKPYVCGKTFHRKSFLTIHQRTHTGKNRMDVMNVEKLFVRNHTLLYIRELTPGKSPMNVMNVENPFIRRQIFRSIKVFTRGRNPMNVANVEKPCQKSVLTVHHRTHTGEKPYECNECGKTFCHKSNLSTHQGTHSGEKPYECDECRKTFYDKTVLTIHQRTHTGEKPFECKECRKTFSQKSKLFVHHRTHTGEKPFRCNECRKTFSQKSGLSIHQRTHTGEKPYECKECGKTFCQKSHLSRHQQTHIGEKSDVAEAGYVFPQNHSFFP

SEQ ID NO: 16379 - protein, 478 aa, Homo Sapiens
MELLTFKDVAIEFSPEEWKCLDTSQQNLYRDVMLENYRNLVSLGVSISNPDLVTSLEQRKEPYNLKIHETAARPPAVCSHFTQNLWTVQGIEDSFHKLIPKGHEKRGHENLRKTCKSINECKVQKGGYNRINQCLLTTQKKTIQSNICVKVFHKFSNSNKDKIRYTGDKTFKCKECGKSFHVLSRLTQHKRIHTGENPYTCEECGKAFNWSSILTKHKRIHAREKFYKCEECGKGFTRSSHLTKHKRIHTGEKPYICEKCGKAFNQSSTLNLHKRIHSAQKYYKCEECGKAFKWSSSLNEHKRIHAGEKPFSCEECGNVFTTSSDFAKHKRIHTGEKPYKCEECGKSFNRSTTLTTHKRIHTGEKPYTCEECGKAFNWSSTLNVHKRIHSGKNPYKCEDCGKAFKVFANLHNHKKIHTGEKPYICKQCGKAFKQSSHLNKHKKIHTVDKPYKCKECGKAFKQYSNLPQHKRTHTGGKF

SEQ ID NO: 16380 - protein, 126 aa, Homo Sapiens
MGLLTFRDVAIEFSREEWEHLDSDQKLLYGDVMLENYGNLVSLGLAVSKPDLITFLEQRKEPWNVKSAETVAIQPDIFSHDTQGLLRKKLIEASFQKVILDGYGSCGPQNLNLRKEWESEGKIILW

SEQ ID NO: 16381 - protein, 911 aa, Homo Sapiens
MCSHFTQDFLPVQGIEDSFHKLILRRYEKCGHDNLQLRKGCKSMNVCKVQKGVYNGINKCLSNTQSKIFQCNARVKVFSKFANSNKDKTRHTGEKHFKCNECGKSFQKFSDLTQHKGIHAGEKPYTCEERGKDFGWYTDLNQHKKIHTGEKPYKCEECGKAFNRSTNLTAHKRIHNREKAYTGEDRDRAFGWSTNLNEYKKIHTGDKPYKCKECGKAFMHSSHLNKHEKIHTGEKPYKCKECGKVISSSSSFAKHKRIHTGEKPFKCLECGKAFNISTTLTKHRRIHTGEKPYTCEVCGKAFRQSANLYVHRRIHTGEKPYTCGECGKTFRQSANLYVHRRIHTGEKPYKCEDCGKAFGRYTALNQHKKIHTGEKPYKCEECGKAFNSSTNLTAHKRIHTREKPYTCEDRGRAFGLSTNLNEYKKIHTGDKPYKCKECGKAFIHSLHLNKHEKIHTGKKPYKCKQCGKVITSSSSFAKHKRIHTGEKPFECLECGKAFTSSTTLTKHRRIHTGEKPYTCEVCGKAFRQSAILYVHRRIHTGEKPYTCEECGKTFRQSANLYVHRRIHTGEKPYKCEECGKAFGRYTDLNQHKKIHTGEKLYKCEECGKDFVWYTDLNQQKKIYTGEKPYKCEECGKAFAPSTDLNQHTKILTGEQSYKCEECGKAFGWSIALNQHKKIHTGEKPYKCEECGKAFSRSRNLTTHRRVHTREKPYKCEDRGRSFGWSTNLNEYKKIHTGDKLYKCKECGKVFKQSSHLNRHEKIHTGKKPYKCKECGKVITSSSSFAKHKRIHTGEKPFKCLECGKAFTSSTTLTKHRRIHTGEKPYTCEECGKAFRQSAILYVHRRIHTGEKPYTCGECGKTFRQSANLYAHKKIHTGEKPYTCGDCGKTFRQSANLYAHKKIHTGDKTIQV

SEQ ID NO: 16382 - protein, 619 aa, Homo Sapiens
MGPLTFMDVAIEFSVEEWQCLDTAQQNLYRNVMLENYRNLVFLGIAVSKPDLITCLEQGKEPWNMERHEMVAKPPGMCCYFAQDLRPEQSIKASLQRIILRKYEKCGHHNLQLKKGYKSVDEYKVHKGSYNGFNQCLTTTQSKIFQCDKYVKDFHKFSNSNRHKTEKNPFKCKECGKSFCVLSHLTQHKRIHTTVNSYKLEECGKAFNVSSTLSQHKRIHTGQKHYKCEECGIAFNKSSHLNTHKIIHTGEKSYKREECGKAFNISSHLTTHKIIHTGENAYKCKECGKAFNQSSTLTRHKIIHAGEKPYICEHCGRAFNQSSNLTKHKRIHTGDKPYKCEECGKAFNVSSTLTQHKRIHTGEKPYKCEECGKAFNVSSTLTQHKRIHTGEKPYKCEECGKAFNTSSHLTTHKRIHTGEKPYKCEECGKAFNQFSQLTTHKIIHTGEKPYKCKECGKAFKRSSNLTEHRIIHTGEKPYKCEECGKAFNLSSHLTTHKKIHTGEKPYKCKECGKAFNQSSTLARHKIIHAGEKPYKCEECGKAFYQYSNLTQHKIIHTGEKPYKCEECGKAFNWSSTLTKHKVIHTGEKPYKCKECGKAFNQCSNLTTHKKIHAVEKSDK

SEQ ID NO: 16383 - protein, 738 aa, Homo Sapiens
MGLLTFRDVAIEFSLEEWQCLDTAQKNLYRNVMLENYRNLAFLGIAVSKPDLIICLEKEKEPWNMKRDEMVDEPPGICPHFAQDIWPEQGVEDSFQKVILRRFEKCGHENLQLRKGCKSVDECKVHKEGYNGLNQCFTTTQGKASQCGKYLKVFYKFINLNRYKIRHTRKKPFKCKNCVKSFCMFSHKTQHKSIYTTEKSYKCKECGKTFNWSSTLTNHKKTHTEEKPYKCEEYGKAFNQSSNYTTHKVTHTGEKPYKCEECGKAFSQSSTLTIHKRIHTGEKPCKCEECGKAFSQPSALTIHKRMHIGEKPYKCEECGKAFVWSSTLTRHKRLHSGEKPYKCEECAKAFSQFGHLTTHRIIHTGEKPYKCEECGKAFIWPSTLTKHKRIHTGEKPYKCEECGKAFHRSSNLTKHKIIHTGEKPYKCEECGKAFIWSSNLTEHKKIHTREKPYKCEECSKAFSRSSALTTHKRMHTGEKPYKCEECGKAFSQSSTLTAHKIIHTGEKPYKCEECGKAFILSSTLSKHKRIHTGEKPYKCEECGKTFNQSSNLSTHKIIHTGEKPYKCEECGKAFNRSSNLSTHKIIHTGEKPYKCDECGKSFIWSSTLFKHKRIHTGEKPYKCEECGKAFNHSQILLHIRHKRMHTGEKPYKCEECGKSFNLSSTFIKHKVIHTGVKLYKCEECGKVFFWSSALTRHKKIHAGQQPYKWEKIGKAFNQSSHLTTDKITHIGEKSYKCE

SEQ ID NO: 16384 - protein, 499 aa, Homo Sapiens
MRVLTFRDVAVEFSPEEWECLDSAQQRLYRDVMLENYGNLFSLGLAIFKPDLITYLEQRKEPWNARRQKTVAKHPAGSLHFTAEILLEHDINDSFQKVILRKSGSCDLNTLRLKKDYQRVGNCKGQKSSYNGIHQCLSATRSKTCQYNKCGKAFGLCSIFTEHKKIFSREKCYKCEECGKDCRLSDFTIQKRIHTADRSYKCEECGKACKKFSNLTEHNRVHTGKKPYKCEECGKTFTCSSALTKHKRNHTGDRPYKCEECHKAFRCCSDLTKHKRIHTGEKPYKCKECHKAFRCCSDLTKHKRIHTGEKPYKCNECGKAFMWISALSQHNRIHTGEKPYICEECGKAFTYSSTLISHKRIHMELRPYKCEECGKTFKWFSDLTNHKRIHTGEKPYKCEECGKSFTCSSNLIKHKRIHMEVRPYKCEECGKTFKWFPDLTNHKRIHTGEKPYKCEECGKTFTCSSSLIKHKRSHTGDRPTSAKNVAKPLGGSQTLLNIR

SEQ ID NO: 16385 - protein, 1252 aa, Homo Sapiens
MPGAPGSLEMGPLTFRDVTIEFSLEEWQCLDTVQQNLYRDVMLENYRNLVFLGMAVFKPDLITCLKQGKEPWNMKRHEMVTKPPVMRSHFTQDLWPDQSTKDSFQEVILRTYARCGHKNLRLRKDCKSANEGKMHKEGYNKLNQCRTATQRKIFQCNKHMKVFHKYSNRNKVRHTKKKTFKCIKCSKSFFMLSCLIRHKRIHIRQNIYKCEERGKAFKSFSTLTKHKIIHTEDKPYKYKKCGNAFKFSSTFTKHKRIHTGETPFRCEECGKAFNQSSNLTDHKRIHTGEKTYKCEECGKAFKGSSNFNAHKVIHTAEKPYKCEDCGKTFNHFSALRKHKIIHTGKKPYKREECGKAFSQSSTLRKHEIIHTGEKPYKCEECGKAFKWSSKLTVHKVVHTGEKPYKCEECGKAFSQFSTLKKHKIIHTGKKPYKCEECGKAFNSSSTLMKHKIIHTGEKPYKCEECGKAFRQSSHLTRHKAIHTGEKPYKCEECGKAFNHFSDLRRHKIIHTGKKPYKCEECGKAFSQSSTLRNHQIIHTGEKPYKCEECGKAFKWSSKLTVHKVIHTGEKPCKCEECGKAFKHFSALRKHKVIHTREKLYKCEECGKAFNNSSILAKHKIIHTGKKPYKCEECGKAFRQSSHLTRHKAIHTGEKPYKCEECGKAFSHFSALRRHKIIHTGKKPYKCEECGKAFSHFSALRRHKIIHTGEKPYKCEECGKAFKWSSKLTVHKVIHTAEKPCKCEECGKSFKHFSALRKHKVIHTREKLYKCEECVKAFNSFSALMKHKVIHTGEKPYKCEECGKAFKWSSKLTVHKVIHTGEKPCKCEECGKAFKHFSALRKHKVIHTGKKPYKCEECGKAFSQSSSLRKHEIIHSGEKPYKCEECGKAFKWLSKLTVHKVIHTAEKPCKCEECGKAFKHFSALRKHKIIHTGKKPYKCEECGKAFNDSSTLMKHKIIHTGKKPYKCAECGKAFKQSSHLTRHKAIHTGEKPYKCEECGKDFNNSSTLKKHKLIHTREKLYKCEECVKAFNNFSALMKHKIIHTGEKPYKCEECGKAFKWSSKLTEHKVIHTGEKPCKCEECDKAFKHFSALRKHKVIHTGKKPYQCDECGKAFNNSSTLTKHKIIHTGEKPYKCEECGKAFSQSSILTKHKIIHSVEKPYKCEECGKAFNQSSHLTRHKTIHTGEKPYKCEECGKAFIQCSYLIRHKTIHTREKPTNVKKVPKLLSNPHTLLDKTIHTGEKPYKCEECAKAF

SEQ ID NO: 16386 - protein, 503 aa, Homo Sapiens
MGALTFRDVAIEFSLEEWQCLDTEQQNLYRNVMLDNYRNLVFLGIAVSKPDLITCLEQEKEPWNLKTHDMVAKPPVICSHIAQDLWPEQGIKDYFQEVILRQYKKCRHENLLLRKGCKNVDEFKMHKKGYNRHNQCLTTSHSKIFQCDKYVKVFHKFSNSNRHKIRHTSKKPFKCKECGKLFCILSHLAQHKKIHTGEKSYKCEEYGKAFNESSNCTTHKRITEKKPYKCKECGKAFNWFSHFTTHKRIHTGEKPYQCEKCGKFFNQSTNLTTHKRIHTGEKPYKCEECGKAFNQSSNLTEHKKIHTKEQPYKCEKCGKAFKWSSTLTKHKRIHNGEKPYKCEECGKAFNRSSTLNRHKITHTGGKPYKYKECGKAFNQSSTLTIHKIIHTVEKFYKCEECGKAFSRISHLTTHKRIHTGEKPYKCEECGRAFNQSSTLTTHKRIHTGEKPYECEECGKAFNRSSTLTTHKIIHSGEKIYKCKECGKAFRRFSHLTRHKTIHT

SEQ ID NO: 16387 - protein, 585 aa, Homo Sapiens
MELLTFRDVAIEFSPEEWKCLDPAQQNLYRDVMLENYRNLISLGVAISNPDLVIYLEQRKEPYKVKIHETVAKHPAVCSHFTQDFLPVQGIEDSFHKLILRRYEKCGHENLELRKSCKRKVQKGGYNEFNQCLSTIQSKIFQCNVHVKVFSTFSNSNQRRIRHTGEKHFKECGKSFQKFSDLTQHQGIHAGEKPYTCEECGKDFKWYLIFNEYEIIHTGEKPFTCEECGNIFTTSSNFAKHKVHTGEKSYKYEECGKAFNRSSTLTKHKRIHAEEKPFTCEECGKIITSSSNVAKHKKIHTGEKLYKCQECGKVFNRSTTLTKHNRIHTGEKPYTCEECGKAFSRSSVLNEHKRIHTGEKPYKCEQCGKAFRQSATLNKHKSIHTGEKPYTCEECGKAFSRFTTLNEHKRIHTGERPHKCEECGKAFGWSTDLNKHKIIHTGEKPYKCEECGKAFGWSAYLSKHKKIHTGEKPYRCEECGKAFLCSRALNKHKTIHTGEKPYECEECGKAFGWSTYLSKHKKIHTGEKPYRCEECGKAFRRSRVLNKYKTIHTGDKTPKCKGCGKAFKWSSYLNQHNKIYTGEKL

SEQ ID NO: 16388 - protein, 412 aa, Homo Sapiens
MAKRPGPPGSREMGLLTFRDIAIEFSLAEWQCLDHAQQNLYRDVMLENYRNLFSLGMTVSKPDLIACLEQNKEPQNIKRNEMAAKHPVTCSHFNQDLQPEQSIKDSLQKVIPRTYGKCGHENLQLKKCCKRVDECEVHKGGYNDLNQCLSNTQNKIFQTHKCVKVFSKFSNSNRHNARYTGKKHLKCKKYGKSFCMFSHLNQHQIIHTKEKSYKCEECGKSFNHSSSGTTHKRILTGEKPYRCEECGKAFRWPSNLTRHKRIHTGEKPYACEECGQAFRRSSTLTNHKRIHTGERPYKCEECGKAFSVSSALIYHKRIHTGEKPYTCEECGKAFNCSSTLKTHKIIHTGEKPYTCEECGRTFNCSSTVKAHKRIHTGEKPYKCEECDKAFKWHSSLAKHKIIHTGEKPYKCK

SEQ ID NO: 16389 - protein, 536 aa, Homo Sapiens
MGPLQFRDVAIEFSLEEWHCLDTAQRNLYRNVMLENYRNLVFLGIVVSKPDLITCLEQGKKPLTMKKHEMVANPSVTCSHFARDLWPEQSIKDSFQKVTLRRYENYGHDNLQFKKGCESVDECKVHKRGYNGLNQYLTTTQSKIFQCDKYVKVIHKFSNSNRHKIRHTGKKPFKCIECGKAFNQSSTLTTHKKIHTGEKPFKCEECGKAFNWSSHLTTHKRIHTGEKRYKCEDCGKAFSRFSYLTAHKIIHSGEKPYKCEECGKAFKRSSNLTTHKIIHTGEKPYKCEECGKAFKRSSILTAHKIIHSGEKPYKCEECGKAFKHPSVLTTHKRIHTGEKPYKCEECGRAFKYFSSLTTHKIIHSGEKPYKCEECGKAFNWSSHLTTHKRIHTGEKPYKCEECGEAFKYSSSLTTHKIIHTGQQPFKCEECGKAFKCFSILTTHKRIHTGEKPYKCEECGKAFNSSSHLTAHKRIHTGEKPYKCERCGKAFKRSFILTRHKRIHTGEKPYKCEECGKGFKCPSTLTTHKVIHTGEKL

SEQ ID NO: 16390 - protein, 644 aa, Homo Sapiens
MEIPAPEPEKTALSSQDPALSLKENLEDISGWGLPEARSKESVSFKDVAVDFTQEEWGQLDSPQRALYRDVMLENYQNLLALGPPLHKPDVISHLERGEEPWSMQREVPRGPCPEWELKAVPSQQQGICKEEPAQEPIMERPLGGAQAWGRQAGALQRSQAAPWAPAPAMVWDVPVEEFPLRCPLFAQQRVPEGGPLLDTRKNVQATEGRTKAPARLCAGENASTPSEPEKFPQVRRQRGAGAGEGEFVCGECGKAFRQSSSLTLHRRWHSREKAYKCDECGKAFTWSTNLLEHRRIHTGEKPFFCGECGKAFSCHSSLNVHQRIHTGERPYKCSACEKAFSCSSLLSMHLRVHTGEKPYRCGECGKAFNQRTHLTRHHRIHTGEKPYQCGSCGKAFTCHSSLTVHEKIHSGDKPFKCSDCEKAFNSRSRLTLHQRTHTGEKPFKCADCGKGFSCHAYLLVHRRIHSGEKPFKCNECGKAFSSHAYLIVHRRIHTGEKPFDCSQCWKAFSCHSSLIVHQRIHTGEKPYKCSECGRAFSQNHCLIKHQKIHSGEKSFKCEKCGEMFNWSSHLTEHQRLHSEGKPLAIQFNKHLLSTYYVPGSLLGAGDAGLRDVDPIDALDVAKLLCVVPPRAGRNFSLGSKPRN

SEQ ID NO: 16391 - protein, 193 aa, Homo Sapiens
MAQASLLACEGLAGVSLVPTAASKKMMLSQIASKQAENGERAGSPDVLRCSSQGHRKDSDKSRSRKDDDSLSEASHSKKTVKKVVVVEQNGSFQVKIPKNFVCEHCFGAFRSSYHLKRHILIHTGEKPFECDICDMRFIQKYHLERHKRVHSGEKPYQCERCHQCFSRTDRLLRHKRMCQGCQSKTSDGQFSL

SEQ ID NO: 16392 - protein, 644 aa, Homo Sapiens
MAEAVAAPISPWTMAATIQAMERKIESQAARLLSLEGRTGMAEKKLADCEKTAVEFGNQLEGKWAVLGTLLQEYGLLQRRLENVENLLRNRNFWILRLPPGSKGESPKEWGKLEDWQKELYKHVMRGNYETLVSLDYAISKPEVLSQIEQGKEPCNWRRPGPKIPDVPVDPSPGSGPPVPAPDLLMQIKQEGELQLQEQQALGVEAWAAGQPDIGEEPWGLSQLDSGAGDISTDATSGVHSNFSTTIPPTSWQTDLPPHHPSSACSDGTLKLNTAASTEDVKIVIKTEVQEEEVVATPVHPTDLEAHGTLFGPGQATRFFPSPAQEGAWESQGSSFPSQDPVLGLREPARPERDMGELSPAVAQEETPPGDWLFGGVRWGWNFRCKPPVGLNPRTGPEGLPYSSPDNGEAILDPSQAPRPFNEPCKYPGRTKGFGHKPGLKKHPAAPPGGRPFTCATCGKSFQLQVSLSAHQRSCGAPDGSGPGTGGGGSGSGGGGGGSGGGSARDGSALRCGECGRCFTRPAHLIRHRMLHTGERPFPCTECEKRFTERSKLIDHYRTHTGVRPFTCTVCGKSFIRKDHLRKHQRNHAAGAKTPARGQPLPTPPAPPDPFKSPASKGPLASTDLVTDWTCGLSVLGPTDGGDM

SEQ ID NO: 16393 - protein, 191 aa, Homo Sapiens
MTDPSLGLTVPMAPPLAPLPPRDPNGAGSEWRKPGAVSFADVAVYFSREEWGCLRPAQRALYRDVMRETYGHLGALGESPTCLPGPCASTGPAAPLGAACGVGGPGAGQAASSQRGVCVLLPQESEAASRRSSPGWRRRPNCGIRLPRIRRWRSVRQKRTQQIPETRKRKDKGKGREPWRSPTLWPPGLLG

SEQ ID NO: 16394 - protein, 778 aa, Homo Sapiens
MNLTEDCMVFEDVAIYFSQEEWGILNDAQRHLHSNVMLENFALLSSVGCWHGAKDEEVPSKQCVSVRVLQVTIPKPALSTLKAQPCKMCSSILKDILHLAEHDGTHPEQGLYTCAAEHDLHQKEQIREKLTRSDEWRPSFVNHSAHVGERNFTCTQGGKDFTASSDLLQQQVLNSGWKLYRDTQDGEAFQGEQNDFNSSQGGKDFCHQHGLFEHQKTHNGERPYEFSECGELFRYNSNLIKYQQNHAGERPYEGTEYGKTFIRKSNLVQHQKIHSEGFLSKRSDPIEHQEILSRPTPYECTQCGKAFLTQAHLVGHQKTHTGEQPYECNKCGKFFMYNSKLIRHQKVHTGERRYECSECGKLFMDSFTLGRHQRVHTGERPFECSICGKFFSHRSTLNMHQRVHAGKRLYKCSECGKAFSLKHNVVQHLKIHTGERPYECTECEKAFVRKSHLVQHQKIHTDAFSKRSDLIQHKRIDIRPRPYTCSECGKAFLTQAHLVGHQKIHTGERPYECTQCAKAFVRKSHLVQHEKIHTDAFSKRSDLIQHKRIDLRPRPYVCSECGKAFLTQAHLDGHQKIQTGERRYECNECGKFFLDSYKLVIHQRIHTGEKPYKCSKCGKFFRYRCTLSRHQKVHTGERPYECSECGKFFRDSYKLIIHQRVHTGEKPYECSNCGKFLRYRSTFIKHHKVCTGEKPHECSKCRELFRTKSSLIIHQQSHTGESPFKLRECGKDFNKCNTGQRQKTHTGERSYECGESSKVFKYNSSLIKHQIIHTGKRP

SEQ ID NO: 16395 - protein, 723 aa, Homo Sapiens
MSLLKERKPKKPHYIPRPPGKPFKYKCFQCPFTCNEKSHLFNHMKYGLCKNSITLVSEQDRVPKCPKSNSLDPKQTNQPDATAKPASSKSVANGLSAFDSKLQHSSAREDIKENLELQARGTHRCLGQKPALHRASPCKSPAPEAALGAQPALEGAARPSAFVPVGEHRLKGPDNAEAPETLALHNPTAKAVSFHTKSAFHTPGYPWKAGSPFLPPEFPHKISSTKGLGAISPYMHPTIPEYPPHFYTEHGLATIYSPYLLAGSSPECDAPLLSVYGTQDPRHFLPHPGPIPKHLAPSPATYDHYRFFQQYPSNLPIPYGFYRPESAFSSYGLRLPPVTGLTRDQSSHLLEEATLVYPASSPSRLNPSDPNRKHVEFESPIPEAKDSSKAGQRDTEGSKMSPRAGSAATGSPGRPSPTDFMQTSQTCEGLYDLSNKAASSALGRLYPPEQSLTAFRPVKKSTECLPAQAAETTAESPVSLNVVNGDPPAPTGSASLVSEAAPSSPDDSSGMGPLNLSKKSEINLAATHEPTYQGSPQAETASFSELQDLPLNLSVKDPCNTQAPRPAFPGRPRAAEPAAAVPQKTGTEGSEDGPSHPETKPGSLDGDGAPPTGPGEEAPDACAVDSSEEQKQTAAVALCQLAAYSPRNIRVGDGDAAAPEPACRQDTPTLSSMESQEAQCDLRPKGQKRTSLRDAGKSQQGAKKAKLQDTARVFTLRRRARVS

SEQ ID NO: 16396 - protein, 296 aa, Homo Sapiens
MYFSQEEWELLDPTQKALYNDVMQENYETVISLALFVLPKPKVISCLEQGEEPWVQVSPEFKDSAGKSPTGLKLKNDTENHQPVSLSDLEIQASAGVISKKAKVKVPQKTAGKENHFDMHRVGKWHQDFPVKKRKKLSTWKQELLKLMDRHKKDCAREKPFKCQECGKTFRVSSDLIKHQRIHTEEKPYKCQQCDKRFRWSSDLNKHLTTHQGIKPYKCSWCGKSFSQNTNLHTHQRTHTGEKPFTCHECGKKFSQNSHLIKHRRTHTGEQPYTCSICRRNFSRRSSLLRHQKLHL

SEQ ID NO: 16397 - protein, 510 aa, Homo Sapiens
MAMRELNADSCSSPQMGAMWETSGSVKENSSQSKKYSTKIENLGPESACRHFWSFRYHEATGPLETISQLQKLCHQWLRPEIHSKEQILEMLVLEQFLSILPKETQNWVQKHHPQNVKQALVLVEFLQREPDGTKNEVTAHELGKEAVLLGGTAVAPGFKWKPAEPQPMGVFQKEYWNTYRVLQEQLGWNTHKETQPVYERAVHDQQMLALSEQKRIKHWKMASKLILPESLSLLTFEDVAVYFSEEEWQLLNPLEKTLYNDVMQDIYETVISLGLKLKNDTGNDHPISVSTSEIQTSGCEVSKKTRMKIAQKTMGRENPGDTHSVQKWHRAFPRKKRKKPATCKQELPKLMDLHGKGPTGEKPFKCQECGKSFRVSSDLIKHHRIHTGEKPYKCQQCDRRFRWSSDLNKHFMTHQGIKPYRCSWCGKSFSHNTNLHTHQRIHTGEKPFKCDECGKRFIQNSHLIKHQRTHTGEQPYTCSLCKRNFSRRSSLLRHQKLHRRREACLVSPN

SEQ ID NO: 16398 - protein, 570 aa, Homo Sapiens
MESLGLHTVTLSDGTTAYVQQAVKGEKLLEGQVIQLEDGTTAYIHQVTVQKEALSFEDGQPVQLEDGSMAYIHRTPREGYDPSTLEAVQLEDGSTAYIHHPVAVPSESTILAVQTEVGLEDLAAEDDEGFSADAVVALEQYASKVLHDSQIPRNGKGQQVGDRAFRCGYKGCGRLYTTAHHLKVHERAHTGDRPYRCDFPSCGKAFATGYGLKSHVRTHTGEKPYKCPEELCSKAFKTSGDLQKHVRTHTGERPFQCPFEGCGRSFTTSNIRKVHVRTHTGERPYTCPEPHCGRGFTSATNYKNHVRIHTGEKPYVCTVPGCGKRFTEYSSLYKHHVVHTHCKPYTCSTCGKTYRQTSTLAMHKRSAHGELEATEESEQALYEQQQLEAASAAEESPPPKRPRIAYLSEVKEERDDIPAQVAMVTEEDGAPQVALITQDGAQQVSLSPEDLQALGSAISMVTQHGSTTLTIPSPDADLATSGTHTVTMVSADGTQTQPVTIITSGAVVAEDSSVASLRHQQVALLATANGTHIAVQLEEQQTLEEAINVATAAMQQGAVTLETTVSESGC

SEQ ID NO: 16399 - protein, 746 aa, Homo Sapiens
MAFSQGLLTFRDVAIEFSQEEWKCLDPAQRTLYRDVMLENYRNLVSLDISSKCTMKEFLSTAQGNREVFHAGTLQIHESHHNGDFCYQDVDKDIHDYEFQWQEDERNGHEAPMTKIKKLTGITERYDQSHARNKPIKDQLGSSFHSHLPEMHIFQTEEKIDNQVVKSVHDASLVSTAQRISCRPKTHISNNHGNNFWNSSLLTQKQEVHMREKSFQCNESGKAFNYSSLLRKHQIIHLADKYKCDVCGKLFNQKRNLACHRRCHTGENPYKCNECGKTFSQTSSLTCHRRLHTGEKPYKCEECDKAFHFKSILERHRIIHTEEKPYKCNECGKTFRQKSILTRHHRLHTGEKPYKCNECGKTFSHKSSLTCHHRLHTGEKPYKCNECGKTFSHKSSLTCHRRLHTGEKPYKCEECDKAYSFRSNFEIHRKIHTEDNAYKCNECGKTFSRTSSLTCHRRRHTGEQPYKCEECDKAFRFKSNLERHRRIHTGEKPYKCNECGKTFSRKSYLTCHHRLHTGEKAYKCNECGKTFSWKSSLTCHRRLHSGEKPYKCKECGKTFNQQLTLKRHRRLHSGENPYKCEDSDKAYSFKSNLEIHQKIHTEENPYKCNECGKTFSRTSSLTCHRRLHTGEKPYKCEECDKAFRVKSNLEGHRRIHTGEKPYKCNECGKTFSRKSYFICHHRLHTGEKPYKCNECGKNFSQKSSLICHHRLHTGEKPYKCNECGKTFSQKSNLTCHRRLHTGEKQV

SEQ ID NO: 16400 - protein, 394 aa, Homo Sapiens
MDPVACEDVAVNFTQEEWALLDISQRKLYREVMLETFRNLTSIGKKWKDQNIEYEYQNPRRNFRSLIEGNVNEIKEDSHCGETFTQVPDDRLNFQEKKASPEAKSCDNFVCGEVGIGNSSFNMNIRGDIGHKAYEYQDYAPKPYKCQQPKKAFRYHPSFRTQERNHTGEKPYACKECGKTFISHSGIRRRMVMHSGDGPYKCKFCGKAVHCLRLYLIHERTHTGEKPYECKQCVKSFSYSATHRIHERTHTGEKPYECQQCGKAFHSSSSFQAHKRTHTGGKPYECKQCGKSFSWCHSFQIHERTHTGEKPCECSKCNKAFRSYRSYLRHKRSHTGEKPYQCKECRKAFTYPSSLRRHERTHSAKKPYECKQCGKALSYKFSNTPKNALWRKTL

SEQ ID NO: 16401 - protein, 408 aa, Homo Sapiens
MAPPLAPLPPRDPNGAGPEWREPGAVSFADVAVYFCREEWGCLRPAQRALYRDVMRETYGHLSALGIGGNKPALISWVEEEAELWGPAAQDPEVAKCQTQTDPADSRNKKKERQREGTGALEKPDPVAAGSPGLKSPQAPSAGPPYGWEQLSKAPHRGRPSLCAHPPVPRADQRHGCYVCGKSFAWRSTLVEHVYSHTGEKPFHCTDCGKGFGHASSLSKHRAIHRGERPHRCLECGRAFTQRSALTSHLRVHTGEKPYGCADCGRRFSQSSALYQHRRVHSGETPFPCPDCGRAFAYPSDLRRHVRTHTGEKPYPCPDCGRCFRQSSEMAAHRRTHSGEKPYPCPQCGRRFGQKSAVAKHQWVHRPGAGGHRGRVAGRLSVTLTPGHGDLDPPVGFQLYPEIFQECG

SEQ ID NO: 16402 - protein, 523 aa, Homo Sapiens
MALPQGLLTFRDVAIEFSQEEWKCLDPAQRTLYRDVMLENYRNLVSLDISSKCMMKEFSSTAQGNREVFHAGTSQRHESHHNGDFCFQDIDKDIHDIEFQWQEDERNGHEALMTKIKKLTGSTERYDQNYAGNKPVKYQLGFSFHSHLPELHIFHTEEKIDNQVVKSIHDASLVSTAQRISCRPETHISNDYGNNFLNSSLFTQKQEVHMREKSFQCNDSGKAYNCSSLLRKHQLIHLGEKQYKCDICGKVFNSKRYVARHRRCHTGEKPYKCNECGKTFSQTYYLTCHRRLHTGEKPYKCEECDKAFHFKSKLQIHRRIHTGEKPYKCNECGKTFSQKSYLTCHRRLHTGEKPYKCNECGKTFSRKSHFTCHHRVHTGEKPYKCNECSKTFSHKSSLTYHRRLHTEEKPYKCNECGKTFNQQLTLNICRLHSGEKPYKCEECDKAYSFKSNLEIHQKIHTEENPYKCNECGKTFSRTSSLTYHHRLHTGQKPYKCEDCDEAFSFKSNLERHRRIYTGEKLHV

SEQ ID NO: 16403 - protein, 468 aa, Homo Sapiens
MAQLRRGHLTFRDVAIEFSQEEWKCLDPVQKALYRDVMLENYRNLVSLGICLPDLSIISMMKQRTEPWTVENEMKVAKNPDRWEGIKDINTGRSCAVRSKAGNKPITNQLGLTFQLPLPELEIFQGEGKIYECNQVQKFISHSSSVSPLQRIYSGVKTHIFNKHRNDFVDFPLLSQEQKAHIRRKPYECNEQGKVFRVSSSLPNHQVIHTADKPNRCHECGKTVRDKSGLAEHWRIRTGEKPYKCKECGKLFNRIAYLARHEKVHTGESPYKCNECGKVFSRITYLVRHQKIHTREKPHKCNKCGKVYSSSSYLAQHWRIHTGEKLYKCNKCGKEFSGHSSLTTHLLIHTGEKPYKCKECDKAFRHKFSLTVHQRNHNGEKPYKCHECGKVFTQVSHLARHQKIHTGEKPYKCNECGKVFTQNSHLANHQRIHTGEKPYKCHVCGKVFRHSSWFVQHQRSVHERVLTN

SEQ ID NO: 16404 - protein, 540 aa, Homo Sapiens
MEREALPWGLEPQDVQSSDEMRSPEGYLRGNMSENEEEEISQQEGSGDYEVEEIPFGLEPQSPGFEPQSPEFEPQSPRFEPESPGFESRSPGLVPPSPEFAPRSPESDSQSPEFESQSPRYEPQSPGYEPRSPGYEPRSPGYESESSRYESQNTELKTQSPEFEAQSSKFQEGAEMLLNPEEKSPLNISVGVHPLDSFTQGFGEQPTGDLPIGPPFEMPTGALLSTPQFEMLQNPLGLTGALRGPGRRGGRARGGQGPRPNICGICGKSFGRGSTLIQHQRIHTGEKPYKCEVCSKAFSQSSDLIKHQRTHTGERPYKCPRCGKAFADSSYLLRHQRTHSGQKPYKCPHCGKAFGDSSYLLRHQRTHSHERPYSCTECGKCYSQNSSLRSHQRVHTGQRPFSCGICGKSFSQRSALIPHARSHAREKPFKCPECGKRFGQSSVLAIHARTHLPGRTYSCPDCGKTFNRSSTLIQHQRSHTGERPYRCAVCGKGFCRSSTLLQHHRVHSGERPYKCDDCGKAFSQSSDLIRHQRTHAAGRR

SEQ ID NO: 16405 - protein, 545 aa, Homo Sapiens
MDCVIFEEVAVNFTPEEWALLDHAQRSLYRDVMLETCRNLASLDCYIYVRTSGSSSQRDVFGNGISNDEEIVKFTGSDSWSIFGENWRFDNTGDQHQIPQRHLRSQLGRLCESNEGHQCGETLSQTANLLVHKSYPTEAKPSECTKCGKAFENRQRSHTGQRPCKECGQACSCLSCQSPPMKTQTVEKPCNCQDSRTASVTYVKSLSSKKSYECQKCGKAFICPSSFRGHVNSHHGQKTHACKVCGKTFMYYSYLTRHVRTHTGEKPYECKECGKAFSCPSYFREHVRTHTGEKPYECKHCGKSFSCYSSFRDHVRTHTGEKPCQCKHCGKAFTCYSSLREHGRTHSGEKPYECKECGKAFRYPSSLRAHMRMHTGEKPYVCKQCGKAFGCPTYFRRHVKTHSGVKPYQCKECGKAYSFSSSLRIHVRTHTGEKPFECKHCGKAFSCHSSLREHVRTHSGEKPYECNQCGKAFSHAQYFQKHVRSHSGVKPYECTECGKAYSCSSSLRVHVRTHTGERPYECKQCGKTFRYLASLQAHVRTHAGA

SEQ ID NO: 16406 - protein, 691 aa, Homo Sapiens
MMAENNLKMLKIQQCVVANKLPRNRPYVCNICFKHFETPSKLARHYLIHTGQKPFECDVCHKTFRQLVHLERHQLTHSLPFKCSICQRHFKNLKTFVKHQQLHNETYQNNVKQVRRLLEAKQEKSMYGVYNTFTTEERWALHPCSKSDPMYSMKRRKNIHACTICGKMFPSQSKLDRHVLIHTGQRPFKCVLCTKSFRQSTHLKIHQLTHSEERPFQCCFCQKGFKIQSKLLKHKQIHTRNKAFRALLLKKRRTESRPLPNKLNANQGGFENGEIGESEENNPLDVHSIYIVPFQCPKCEKCFESEQILNEHSCFAARSGKIPSRFKRSYNYKTIVKKILAKLKRARSKKLDNFQSEKKVFKKSFLRNCDLISGEQSSEQTQRTFVGSLGKHGTYKTIGNRKKKTLTLPFSWQNMGKNLKGILTTENILSIDNSVNKKDLSICGSSGEEFFNNCEVLQCGFSVPRENIRTRHKICPCDKCEKVFPSISKLKRHYLIHTGQRPFGCNICGKSFRQSAHLKRHEQTHNEKSPYASLCQVEFGNFNNLSNHSGNNVNYNASQQCQAPGVQKYEVSESDQMSGVKAESQDFIPGSTGQPCLPNVLLESEQSNPFCSYSEHQEKNDVFLYRCSVCAKSFRSPSKLERHYLIHAGQKPFECSVCGKTFRQAPHWKRHQLTHFKERPQGKVVALDSVM

SEQ ID NO: 16407 - protein, 317 aa, Homo Sapiens
MPGEQQAEEEEEEEMQEEMVLLVKGEEDEGEEKYEVVKLKIPMDNKEVPGEAPAPSADPARPHACPDCGRAFARRSTLAKHARTHTGERPFGCTECGRRFSQKSALTKHGRTHTGERPYECPECDKRFSAASNLRQHRRRHTGEKPYACAHCGRRFAQSSNYAQHLRVHTGEKPYACPDCGRAFGGSSCLARHRRTHTGERPYACADCGTRFAQSSALAKHRRVHTGEKPHRCAVCGRRFGHRSNLAEHARTHTGERPYPCAECGRRFRLSSHFIRHRRAHMRRRLYICAGCGRDFKLPPGATAATATERCPECEGS

SEQ ID NO: 16408 - protein, 489 aa, Homo Sapiens
MAAAEPMGPAQVPMNSEVIVDPIQGQVNFEDVFVYFSQEEWVLLDEAQRLLYRDVMLENFALMASLGHTSFMSHIVASLVMGSEPWVPDWVDMTLAVATETPGGSDPGCWHGMEDEEIPFEQSFSIGMSQIRIPKGGPSTQKAYPCGTCGLVLKDILHLAEHQETHPGQKPYMCVLCGKQFCFSANLHQHQKQHSGEKPFRSDKSRPFLLNNCAVQSMEMSFVTGEACKDFLASSSIFEHHAPHNEWKPHSNTKCEEASHCGKRHYKCSECGKTFSRKDSLVQHQRVHTGERPYECGECGKTFSRKPILAQHQRIHTGEMPYECGICGKVFNHSSNLIVHQRVHTGARPYKCSECGKAYSHKSTLVQHESIHTGERPYECSECGKYFGHKYRLIKHWSVHTGARPYECIACGKFFSQSSDLIAHQRVHNGEKPYVCSECGKAFSHKHVLVQHHRIHTGERPYKCSECGKAFRQRASLIRHWKIHTGERP

SEQ ID NO: 16409 - protein, 442 aa, Homo Sapiens
MAAATLRDPAQQGYVTFEDVAVYFSQEEWRLLDDAQRLLYRNVMLENFTLLASLGLASSKTHEITQLESWEEPFMPAWEVVTSAILRGSWQGAKAEAAAEQSASVEVPSSNVQQHQKQHCGEKPLKRQEGRVPVLRSCRVHLSEKSLQSREVGKDLLTSSGVLKHQVTHTGEKSHRSSKSREAFHAGKRHYKCSECGKAFGQKYLLVQHQRLHTGEKPYECSECGKLFSHKSNLFIHQIVHTGERPYGCSDCGKSFSRNADLIQHQRVHTGEKPFTCSECGKAFRHNSTLVQHHRIHTGVRPYECSECGKLFSFNSSLMKHQRVHTGERPYKCSECGKFYSHKSSLINHWRVHTGERPYECSECGKFFSQSSSLMQHRKVHTGEKPFKCNECGRFFSENSSLVKHQRVHTGAKPYECRECGKFFRHSSSLVKHRRIHTGEIQ

SEQ ID NO: 16410 - protein, 483 aa, Homo Sapiens
MWLGTSGKSGLPGHCLENPLQECHPAQLEEWALKGISRPSVISQPEQKEEPWVLPLQNFEARKIPRESHTDCEHQVAKLNQDNSETAEQCGTSSERTNKDLSHTLSWGGNWEQGLELEGQHGTLPGEGQLESFSQERDLNKLLDGYVGEKPMCAECGKSFNQSSYLIRHLRTHTGERPYTCIECGKGFKQSSDLVTHRRTHTGEKPYQCKGCEKKFSDSSTLIKHQRTHTGERPYECPECGKTFGRKPHLIMHQRTHTGEKPYACLECHKSFSRSSNFITHQRTHTGVKPYRCNDCGESFSQSSDLIKHQRTHTGERPFKCPECGKGFRDSSHFVAHMSTHSGERPFSCPDCHKSFSQSSHLVTHQRTHTGERPFKCENCGKGFADSSALIKHQRIHTGERPYKCGECGKSFNQSSHFITHQRIHLGDRPYRCPECGKTFNQRSHFLTHQRTHTGEKPFHCSKCNKSFRQKAHLLCHQNTHLI

SEQ ID NO: 16411 - protein, 537 aa, Homo Sapiens
MESGLAGNGTGAGLVMKVKQEKPERLLQTLAPQAMLVEKDKENIFQQHRGLPPRQTMGRPRALGGQEESGSPRWAPPTEQDAGLAGRAPGSASGPLSPSLSSGEGHFVCLDCGKRFSWWSSLKIHQRTHTGEKPYLCGKCGKSFSQKPNLARHQRHHTGERPFCCPECARRFSQKQHLLKHQKTHSRPATHSCPECERCFRHQVGLRIHQRAHARDRQGSRAGLHELIQDAAARRACRLQPGPPRGRPEWAWLGLCQGWWGQPGARAAVSGPEGPGEPRQFICNECGKSFTWWSSLNIHQRIHTGERPYACPECGRRFSQKPNLTRHLRNHTGERPHPCPHCGRGFRQKQHLLKHLRTHLPGAQAAPCPSCGKSCRSRAALRAHQRAHAVAEPAVPAGEPGDQPQAEAIPGLAARPRSSQRSPGARDTLWGRGQAGLAGPGEPRQFICNECGKSFSWWSALTIHQRIHTGERPYPCPECGRRFSQKPNLTRHRRNHTGERPYLCPACGRGFSQKQHLLKHQRVHRAAPACSPKEEAR

SEQ ID NO: 16412 - protein, 518 aa, Homo Sapiens
MAAAALRPPAQGTVTFEDVAVNFSQEEWSLLSEAQRCLYHDVMLENLTLISSLGCWYGAKDETPSKQTLSIQQESPLRTHWTGVCTKKVHLWGMCGPLLGDILHQGTQHNQKLNGFGAYEKKLDDDANHHQDQKQHIGEKSYRSNAKGTSFVKNCKFHMSHEPFIFHEVGKDFLSSLRLLQQEDIHTSGKSNFETKHGIPLQGGKTHYICGESTIPFSNKHSLVLHQRLLPREGPYVCSDSGKFTSKSNSFNNHQGVRTGKRPYQCGQCDESFWYKAHLTEHQRVHTGERPYECGECDKSFSHKHSLVDHQRVHTGERPYECDECGKSFSHKRSLVHHQRVHTGERPYQCGECGKSFNHKCNLIQHQRVHTGERPFECTACGKLFRSNSHLKEHQRVHTGERPYECKECRKSFRYKSHLTEHQRVHTGERPYECRECGKCFHQKGSLIQHQQIHSGERPHECGECGKCFHQKGSLIRHQQIHSGERPHECGECGKCFRQKGNLIKHQRVHTGERHHEC

SEQ ID NO: 16413 - protein, 760 aa, Homo Sapiens
MENQRSSPLSFPSVPQEETLRQAPAGLPRETLFQSRVLPPKEIPSLSPTIPRQGSLPQTSSAPKQETSGRMPHVLQKGPSLLCSAASEQETSLQGPLASQEGTQYPPPAAAEQEVSLLSHSPHHQEAPVHSPEAPEKDPLTLSPTVPETDMDPLLQSPVSQKDTPFQISSAVQKEQPLPTAEITRLAVWAAVQAVERKLEAQAMRLLTLEGRTGTNEKKIADCEKTAVEFANHLESKWVVLGTLLQEYGLLQRRLENMENLLKNRNFWILRLPPGSNGEVPKVPVTFDDVAVHFSEQEWGNLSEWQKELYKNVMRGNYESLVSMDYAISKPDLMSQMERGERPTMQEQEDSEEGETPTDPSAAHDGIVIKIEVQTNDEGSESLETPEPLMGQVEEHGFQDSELGDPCGEQPDLDMQEPENTLEESTEGSSEFSELKQMLVQQRNCTEGIVIKTEEQDEEEEEEEEDELPQHLQSLGQLSGRYEASMYQTPLPGEMSPEGEESPPPLQLGNPAVKRLAPSVHGERHLSENRGASSQQQRNRRGERPFTCMECGKSFRLKINLIIHQRNHIKEGPYECAECEISFRHKQQLTLHQRIHRVRGGCVSPERGPTFNPKHALKPRPKSPSSGSGGGGPKPYKCPECDSSFSHKSSLTKHQITHTGERPYTCPECKKSFRLHISLVIHQRVHAGKHEVSFICSLCGKSFSRPSHLLRHQRTHTGERPFKCPECEKSFSEKSKLTNHCRVHSRERPPPRWSSSFCSL

SEQ ID NO: 16414 - protein, 729 aa, Homo Sapiens
MAAPDLAHGGHVSRDSVCLHEEQTQAAGMVAGWLINCYQDAVTFDDVAVDFTQEEWTLLDPSQRDLYRDVMLENYENLASVEWRLKTKGPALRQDRSWFRASNETQTARSHNGGQLCDRTQCGEAFSEHSGLSTHVRTQNTGDSCVSNHYERDFFIPCQKTLFKIGEQFSVLGQCGKAFSSTPNVVSQQACTRDRSLDYSSCGEVFLNQSYLQARAGSHNGEETWKWKPCGKALTHSMGCATPVEMHAVRNPHVCRECGKAFRYTAYLTGRVQVHPGEKPCELEECGKASPVSSSLTQHVRIHAAEKPCECKECGKAFTGLSGLSKHVQTDPGQKPYECKDCGKACGGFYLLNEHGKTHTREKPFACVVCGKYFRNSSCLNNHVRIHTGIKPYTCSYCGKAFTVRCGLTRHVRTHTGEKPYTCKDCGKAFCTSSGLTEHVRTHTGEKPYECKDCGKSFTVSSSLTEHARIHTGEKPYECKQCGKAFTGRSGLTKHMRTHTGEKPYECKDCGKAYNRVYLLNEHVKTHTEEKPFICTVCRKSFRNSSCLNKHIQIHTGIKPYECKDCGKTFTVSSSLTEHIRTHTGEKPYECKVCGKAFTTSSHLIVHIRTHTGEKPYICKECGKAFASSSHLIEHRRTHTGEKPYICNECGKAFRASSHLHKHGRIHTGQKPYKCKECGKAYNRFYLLKEHLKTYTEEQVFVCKDCGKSFKNSSCLNHHTQIHTDEKPF

SEQ ID NO: 16415 - protein, 641 aa, Homo Sapiens
MVHGSVTFRDVAIDFSQEEWECLQPDQRTLYRDVMLENYSHLISLGSSISKPDVITLLEQEKEPWMVVRKETSRRYPDLELKYGPEKVSPENDTSEVNLPKQVIKQISTTLGIEAFYFRNDSEYRQFEGLQGYQEGNINQKMISYEKLPTHTPHASLICNTHKPYECKECGKYFSRSANLIQHQSIHTGEKPFECKECGKAFRLHIQFTRHQKFHTGEKPFECNECGKAFSLLTLLNRHKNIHTGEKLFECKECGKSFNRSSNLVQHQSIHSGVKPYECKECGKGFNRGAHLIQHQKIHSNEKPFVCKECGMAFRYHYQLIEHCQIHTGEKPFECKECGKAFTLLTKLVRHQKIHTGEKPFECRECGKAFSLLNQLNRHKNIHTGEKPFECKECGKSFNRSSNLVQHQSIHAGIKPYECKECGKGFNRGAHLIQHQKIHSNEKPFVCRECEMAFRYHCQLIEHSRIHTGDKPFECQDCGKAFNRGSSLVQHQSIHTGEKPYECKECGKAFRLYLQLSQHQKTHTGEKPFECKECGKFFRRGSNLNQHRSIHTGKKPFECKECGKAFRLHMHLIRHQKLHTGEKPFECKECGKAFRLHMQLIRHQKLHTGEKPFECKECGKVFSLPTQLNRHKNIHTGEKAS

SEQ ID NO: 16416 - protein, 833 aa, Homo Sapiens
MVHGSVTFRDVAIDFSQEEWECLQPDQRTLYRDVMLENYSHLISLGSSISKPDVITLLEQEKEPWIVVSKETSRWYPDLESKYGPEKISPENDIFEINLPKHVIKQISKTLGLEAFYFRNDSEYRSRFEGRQGHQEGYINQKIISYEEMPAYTHASPIHNTHKPYECKECGKYFSCGSNLIQHQSIHTGEKPYKCKECGKAFQLHIQLTRHQKFHTGEKTFECKECGKAFNLPTQLNRHKNIHTVKKLFECKECGKSFNRSSNLTQHQSIHAGVKPYQCKECGKAFNRGSNLIQHQKIHSNEKPFVCRECEMAFRYHYQLIEHCRIHTGEKPFECKECRKAFTLLTKLVRHQKIHMGEKPFECRECGKAFSLLNQLNRHKNIHTGEKPFECKECGKSFNRSSNLIQHQSIHADVKPYECKECGKGFNRGANLIQHQKIHSNEKPFVCRECEMAFRYHYQLIQHCQIHTGGKPFECKECGKAFSLLTQLARHKNIHTGEKPFECKDCGKAFNRGSNLVQHQSIHTGEKPYECKECGKAFRLHLQLSQHEKTHTGEKPFECKECGKFFRRGSNLNQHRSIHTGKKPFECKECGKAFRLHMHLIRHQKFHTGEKPFECKECGKAFSLHTQLNHHKNIHTGEKPFKCKECGKSFNRVSNLVQHQSIHAGVKPYECKECGKGFSRVSNLIQHQKTHSSAKPFVCKECRKTFRYHYQLTEHYRIHTGEKPFECKECGKAFGLLTQLAQHQIIHTGEKPFKCKECGKAFNRGSNLVQPQSIHTGEKPYECKECGKAFRLHLQLSLHQKLVQVRNPLNVRNVGQPSDISSNLLNIRKFILG

SEQ ID NO: 16417 - protein, 355 aa, Homo Sapiens
MQRNAMYLKNVAETACNFQLTQYQISHANQKPYECQICGKPFRKRAHLTQHNRIHTGGKPYECKECGKVFICCSTLIQHKRTHTSEKPYECLECRKTFRRSAHLIRHQRIHTGEKPYKCKQCWKAFASVSDLIDIGKFTLMRDFTNVQNVGRHLTIAQLLFSIREFTLVRSPLNVRNVAKHSIIAQHLLNTRELILMRNLMNVRNVKRLLGKVHILLNIKEFILVRNHMSVSNVGRLSLVFLILIDIREFTLVKNPMNVKNVVELLTIVQLLFNTREFTLVRRLMNISSVGRFLSPVQHLFNIREHILMKNLMNVSNARRPSSIMHILFDIKEFILVRNLINVSNVGRPLLLFLI

SEQ ID NO: 16418 - protein, 699 aa, Homo Sapiens
MNTFQASVSFQDVTVEFSQEEWQHMGPVERTLYRDVMLENYSHLVSVGYCFTKPELIFTLEQGEDPWLLEKEKGFLSRNSPEDSQPDEISEKSPENQGKHLLQVLFTNKLLTTEQEISGKPHNRDINIFRARMMPCKCDIAGSACQGLSLMAPHCQYSKEKAHERNVCDKWLISIKDGRTNTQEKSFAYSKIVKTLHHKEEVIQHQTIQTLGQDFEYNESRKAFLEKAALVTSNSTHPKGKSYNFNKFGENKYDKSTFIIPQNMNPEKSHYEFNDTGNCFCRITHKTLTGGKSFSQKSHIREHHRVHIGVKPFEYGKSFNRNSTLPVHQRTHATDKYSDYHPCTETFSYQSTFSVHQKVHIRAKPYEYNECGKSCSMNSHLIWPQKSHTGEKPYECPECGKAFSEKSRLRKHQRTHTGEKPYKCDGCDKAFSAKSGLRIHQRTHTGEKPFECHECGKSFNYKSILIVHQRTHTGEKPFECNECGKSFSHMSGLRNHRRTHTGERPYKCDECGKAFKLKSGLRKHHRTHTGEKPYKCNQCGKAFGQKSQLRGHHRIHTGEKPYKCNHCGEAFSQKSNLRVHHRTHTGEKPYQCEECGKTFRQKSNLRGHQRTHTGEKPYECNECGKAFSEKSVLRKHQRTHTGEKPYNCNQCGEAFSQKSNLRVHQRTHTGEKPYKCDKCGRTFSQKSSLREHQKAHPGD

SEQ ID NO: 16419 - protein, 281 aa, Homo Sapiens
MAEAAPARDPETDKHTEDQSPSTPLPQPAAEKNSYLYSTEITLWTVVAAIQALEKKVDSCLTRLLTLEGRTGTAEKKLADCEKTAVEFGNQLEGKWAVLGTLLQEYGLLQRRLENVENLLRNRNFWILRLPPGSKGEAPKVPVTFDDVAVYFSELEWGKLEDWQKELYKHVMRGNYETLVSLDYAISKPDILTRIERGEEPCLDRWGQEKGNEVEVGRPRMMGTGLPPYPEHLTSPLSPAQEELKEGQAPKQQQDSEARVAPAGPEAGLALRTDLQGEAQI

SEQ ID NO: 16420 - protein, 323 aa, Homo Sapiens
MAAARPEAQSRSSPTPESRSQEPLDLVLVPDDCRPGTPPSDLIEIQVVKVTDTTLVPEPPEPGSFHCALCPAAFRLVSELLFHEHGHLAGAEGGGQGGDPSRCHVCGHSCPGPASLRAHYSLHTGERPYRCALCPRAFKALAPLLRHQHRHGVEPGTSRRPPDTAAVAEQRPGVAPERAEVVMAAAAAGAAVGKPFACRFCAKPFRRSSDMRDHERVHTGERPYHCGICGKGFTQSSVLSGHARIHTGERPFRCTLCDRTFNNSSNFRKHQRTHFHGPGPGLGDSGGQLGSSAAEGSGSGCGVGDPAEEGRGETAKVKVEADQ

SEQ ID NO: 16421 - protein, 405 aa, Homo Sapiens
MGPPLAPRPAHVPGEAGPRRTRESRPGAVSFADVAVYFSPEEWECLRPAQRALYRDVMRETFGHLGALGFSVPKPAFISWVEGEVEAWSPEAQDPDGESSAAFSRGQGQEAGSRDGNEEKERLKKCPKQKEVAHEVAVKEWWPSVACPEFCNPRQSPMNPWLKDTLTRRLPHSCPDCGRNFSYPSLLASHQRVHSGERPFSCGQCQARFSQRRYLLQHQFIHTGEKPYPCPDCGRRFRQRGSLAIHRRAHTGEKPYACSDCKSRFTYPYLLAIHQRKHTGEKPYSCPDCSLRFAYTSLLAIHRRIHTGEKPYPCPDCGRRFTYSSLLLSHRRIHSDSRPFPCVECGKGFKRKTALEAHRWIHRSCSERRAWQQAVVGRSEPIPVLGGKDPPVHFRHFPDIFQECG

SEQ ID NO: 16422 - protein, 782 aa, Homo Sapiens
MAEPPRLPLTFEDVAIYFSEQEWQDLEAWQKELYKHVMRSNYETLVSLDDGLPKPELISWIEHGGEPFRKWRESQKSGNIICSSVDMHFDPGFEEQLFWGSQQAMNSGKTKSHFQLDPESQCSFGSFVSFRPDQGITLGSPQRHDARAPPPLACGPSESTLKEGIPGPRNLDLPGLWDVPAWESTQHPWPVCGESCWENNHLVMHQRGHSKDRTRRAWEKFNKRAETQMPWSSPRVQRHFRCGVCGKSFRRKLCLLRHLAAHTGRGPFRNADGEMCFRHELTHPSHRLPQQGEKPAQCTPCGKRSLPVDSTQARRCQHSREGPASWREGRGASSSVHSGQKPGSRLPQEGNSHQEGDTEALQHGAEGPCSCSECGERSPMSARLASPCRAHTGEKPFQCAHCTKRFRLRRLLQVHQHAHGGERPFSCRKCGKGFAKQCKLTEHIRVHSGEKPFRCAKCGRNFRQRGQLLRHQRLHTDEKPFQCPECGLSFRLESMLRAHRLRHGGERPFSCSECGRGFTHQCKLREHLRVHSGERPFQCLKCDKRFRLKGILKAHQHTHSKERPFSCGECGKGFTRQSKLTEHLRVHSGERPFQCPECNRSFRLKGQLLSHQRLHTGERPFQCPECDKRYRVKADMKAHQLLHSGEMPFSCECGKGFVKHSKLIEHIRTHTGEKPFQCPKCDKSFRLKAQLLSHQGLHTGERPFHCPECDKNFRERGHMLRHQRIHRPERPFACGDCGKGFIYKSKLAEHIRVHTKSCPAPNELDIKKRLSQLFAMIEADWS

SEQ ID NO: 16423 - protein, 382 aa, Homo Sapiens
MELREEAWSPGPLDSEDQQMASHENPVDILIMDDDDVPSWPPTKLSPPQSAPPAGPPPRPRPPAPYICNECGKSFSHWSKLTRHQRTHTGERPNACADCGKTFSQSSHLVQHRRIHTGEKPYACLECGKRFSWSSNLMQHQRIHTGEKPYTCPDCGRSFTQSKSLAKHRRSHSGLKPFVCPRCGRGFSQPKSLARHLRLHPELSGPGVAAKVLAASVRRAKGPEEAVAADGEIAIPVGDGEGIIVVGAPGEGAAAAAAMAGAGAKAAGPRSRRAPAPKPYVCLECGKGFGHGAGLLAHQRAQHGDGLGAAGGEEPAHICVECGEGFVQGAALRRHKKIHAVGAPSVCSSCGQSYYRAGGEEEDDDDEAAGGRCPECRGGEGR

SEQ ID NO: 16424 - protein, 82 aa, Homo Sapiens
MRNMIPQDNENPPQQGEANQNDSVAFEDVAVNFTPDEWALLDPSQKNLYREVMQETLRNLASIEVLWKRDSLKVKVISMEKF

SEQ ID NO: 16425 - protein, 425 aa, Homo Sapiens
MFPPARGKELLSFEDVAMYFTREEWGHLNWGQKDLYRDVMLENYRNMVLLGFQFPKPEMICQLENWDEQWILDLPRTGNRKASGSACPGSEARHKMKKLTPKQKFSEDLESYKISVVMQESAEKLSEKLHKCKEFVDSCRLTFPTSGDEYSRGFLQNLNLIQDQNAQTRWKQGRYDEDGKPFNQRSLLLGHERILTRAKSYECSECGKVIRRKAWFDQHQRIHFLENPFECKVCGQAFRQRSALTVHKQCHLQNKPYRCHDCGKCFRQLAYLVEHKRIHTKEKPYKCSKCEKTFSQNSTLIRHQVIHSGEKRHKCLECGKAFGRHSTLLCHQQIHSKPNTHKCSECGQSFGRNVDLIQHQRIHTKEEFFQCGECGKTFSFKRNLFRHQVIHTGSQPYQCVICGKSFKWHTSFIKHQGTHKGQIST

SEQ ID NO: 16426 - protein, 498 aa, Homo Sapiens
MLEEGVLPSPGPALPQEENTGEEGMAAGLLTAGPRGSTFFSSVTVAFAQERWRCLVSTPRDRFKEGIPGKSRSLVLLGLPVSQPGMNSQLEQREGAWMLEGEDLRSPSPGWKIISGSPPEQALSEASFQDPCVEMPPGDSDHGTSDLEKSFNLRPVLSPQQRVPVEARPRKCETHTESFKNSEILKPHRAKPYACNECGKAFSYCSSLSQHQKSHTGEKPYECSECGKAFSQSSSLIQHQRIHTGEKPYKCSECGRAFSQNANLTKHQRTHTGEKPYRCSECEKAFSDCSALVQHQRIHTGEKPYECSDCGKAFRHSANLTNHQRTHTGEKPYKCSECGKAFSYCAAFIQHQRIHTGEKPYRCAACGKAFSQSANLTNHQRTHTGEKPYKCSECGKAFSQSTNLIIHQKTHTGEKPYKCNECGKFFSESSALIRHHIIHTGEKPYECNECGKAFNQSSSLSQHQRIHTGVKPYECSECGKAFRCSSAFVRHQRLHAGE

SEQ ID NO: 16427 - protein, 636 aa, Homo Sapiens
MAHLMMFRDVAVDFSQEEWECLDLEQRDLYRDVMLENYSNMVSLGFCIYQPEAFSLLEKGKEPWKILRDETRGPCPDMQSRCQTKKLLPKNGIFEREIAQLEIMRICKNHSLDCLCFRGDWEGNTQFQTLQDNQEECFKQVIRTCEKRPTFNQHTVFNLHQRLNTGDKLNEFKELGKAFISGSDHTQHQLIHTSEKFCGDKECGNTFLPDSEVIQYQTVHTVKKTYECKECGKSFSLRSSLTGHKRIHTGEKPFKCKDCGKAFRFHSQLSVHKRIHTGEKSYECKECGKAFSCGSDLTRHQRIHTGEKPYECNECRKAFSQRSHLIKHQRIHTGEKPYECKECGKAFTRGSHLTQHQRIHTGEKSHECKECGKAFIRGSNLAQHQNVHVGRKPYKCEKCGKAYIWSSHLARHQRIHTGRKPYECKQCGKTFTWASYLAQHEKIHNERKSYECKECGKTFLHGSEFNRHQKIHTGERNYECKECGKTFFRGSELNRHQKIHTGKRPYECEECGKAFLWGSQLTRHQRMHTGEEPYVCKECGKSFIWGSQLTRHKKIHTDAEPYGCKKSSHIFSHHSYFTEQKIHNSANLCEWTDYGNTFSHESNFAQHQNIYTFEKSYEFKDFEKAFSSSSHFISLL

SEQ ID NO: 16428 - protein, 576 aa, Homo Sapiens
MDSVAFEDVSVSFSQEEWALLAPSQKKLYRDVMQETFKNLASIGEKWEDPNVEDQHKNQGRNLRSHTGERLCEGKEGSQCAENFSPNLSVTKKTAGVKPYECTICGKAFMRLSSLTRHMRSHTGYELFEKPYKCKECEKAFSYLKSFQRHERSHTGEKPYKCKQCGKTFIYHQPFQRHERTHIGEKPYECKQCGKALSCSSSLRVHERIHTGEKPYECKQCGKAFSCSSSIRVHERTHTGEKPYACKECGKAFISHTSVLTHMITHNGDRPYKCKECGKAFIFPSFLRVHERIHTGEKPYKCKQCGKAFRCSTSIQIHERIHTGEKPYKCKECGKSFSARPAFRVHVRVHTGEKPYKCKECGKAFSRISYFRIHERTHTGEKPYECKKCGKTFNYPLDLKIHKRNHTGEKPYECKECAKTFISLENFRRHMITHTGDGPYKCRDCGKVFIFPSALRTHERTHTGEKPYECKQCGKAFSCSSYIRIHKRTHTGEKPYECKECGKAFIYPTSFQGHMRMHTGEKPYKCKECGKAFSLHSSFQRHTRIHNYEKPLECKQCGKAFSVSTSLKKHMRMHNR

SEQ ID NO: 16429 - protein, 632 aa, Homo Sapiens
MAAAALRDPAQGCVTFEDVTIYFSQEEWVLLDEAQRLLYCDVMLENFALIASLGLISFRSHIVSQLEMGKEPWVPDSVDMTSAMARGAYGRPGSDFCHGTEGKDLPSEHNVSVEGVAQDRSPEATLCPQKTCPCDICGLRLKDILHLAEHQTTHPRQKPFVCEAYVKGSEFSANLPRKQVQQNVHNPIRTEEGQASPVKTCRDHTSDQLSTCREGGKDFVATAGFLQCEVTPSDGEPHEATEGVVDFHIALRHNKCCESGDAFNNKSTLVQHQRIHSRERPYECSKCGIFFTYAADLTQHQKVHNRGKPYECCECGKFFSQHSSLVKHRRVHTGESPHVCGDCGKFFSRSSNLIQHKRVHTGEKPYECSDCGKFFSQRSNLIHHKRVHTGRSAHECSECGKSFNCNSSLIKHWRVHTGERPYKCNECGKFFSHIASLIQHQIVHTGERPHGCGECGKAFSRSSDLMKHQRVHTGERPYECNECGKLFSQSSSLNSHRRLHTGERPYQCSECGKFFNQSSSLNNHRRLHTGERPYECSECGKTFRQRSNLRQHLKVHKPDRPYECSECGKAFNQRPTLIRHQKIHIRERSMENVLLPCSQHTPEISSENRPYQGAVNYKLKLVHPSTHPGEVP

SEQ ID NO: 16430 - protein, 406 aa, Homo Sapiens
MIEYQIPVSFKDVVVGFTQEEWHRLSPAQRALYRDVMLETYSNLVSVGYEGTKPDVILRLEQEEAPWIGEAACPGCHCWEDIWRVNIQRKRRQDMLLRPGAAISKKTLPKEKSCEYNKFGKISLLSTDLFSSIQSPSNWNPCGKNLNHNLDLIGFKRNCAKKQDECYAYGKLLQRINHGRRPNGEKPRGCSHCEKAFTQNPALMYKPAVSDSLLYKRKRVPPTEKPHVCSECGKAFCYKSEFIRHQRSHTGEKPYGCTDCGKAFSHKSTLIKHQRIHTGVRPFECFFCGKAFTQKSHRTEHQRTHTGERPFVCSECGKSFGEKSYLNVHRKMHTGERPYRCRECGKSFSQKSCLNKHWRTHTGEKPYGCNECGKAFYQKPNLSRHQKIHARKNAYRNENLIIVGNT

SEQ ID NO: 16431 - protein, 643 aa, Homo Sapiens
MASVALEDVAVNFTREEWALLGPCQKNLYKDVMQETIRNLDCVGMKWKDQNIEDQYRYPRKNLRCRMLERFVESKDGTQCGETSSQIQDSIVTKNTLPGVGPYESRMSGEVIMGHSSLNCYIRVGAGHKPYEYHECGEKPDTHKQRGKAFSYHNSLQTHERLHTGKKPYNCKECGKSFSSLGNLQRHMAVQRGDGPYKCKLCGKAFFWPSLLHMHERTHTGEKPYECKQCSKAFSFYSSYLRHERTHTGEKLYECKQCSKAFPDYSSCLRHERTHTGKKPYTCKQCGKAFSASTSLRRHETTHTDEKPYACQQCGKAFHHLGSFQRHMVMHTRDGPHKCKICGKGFDCPSSLKSHERTHTGEKLYECKQCGKALSHSSSFRRHMTMHTGDGPHKCKICGKAFVYPSVFQRHEKTHTAEKPYKCKQCGKAYRISSSLRRHETTHTGEKPYKCKCGKAFIDFYSFQNHKTTHAGEKPYECKECGKAFSCFQYLSQHRRTHTGEKPYECNTCKKAFSHFGNLKVHERIHSGEKPYECKECGKAFSWLTCFLRHERIHMREKPYECQQCGKAFTHSRFLQGHEKTHTGENPYECKECGKAFASLSSLHRHKKTHWKKTHTGENPYGCKECGKAFASLSSLHRHKKTH

SEQ ID NO: 16432 - protein, 575 aa, Homo Sapiens
MDPEDEGVAGVMSVGPPAARLQEPVTFRDVAVDFTQEEWGQLDPTQRILYRDVMLETFGHLLSIGPELPKPEVISQLEQGTELWVAERGTTQGCHPAWEPRSESQASRKEEGLPEEEPSHVTGREGFPTDAPYPTTLGKDRECQSQSLALKEQNNLKQLEFGLKEAPVQDQGYKTLRLRENCVLSSSPNPFPEISRGEYLYTYDSQITDSEHNSSLVSQQTGSPGKQPGENSDCHRDSSQAIPITELTKSQVQDKPYKCTDCGKSFNHNAHLTVHKRIHTGERPYMCKECGKAFSQNSSLVQHERIHTGDKPYKCAECGKSFCHSTHLTVHRRIHTGEKPYECQDCGRAFNQNSSLGRHKRTHTGEKPYTCSVCGKSFSRTTCLFLHLRTHTEERPYECNHCGKGFRHSSSLAQHQRKHAGEKPFECRQRLIFEQTPALTKHEWTEALGCDPPLSQDERTHRSDRPFKCNQCGKCFIQSSHLIRHQITHTREEQPHGRSRRREQSSSRNSHLVQHQHPNSRKSSAGGAKAGQPESRALALFDIQKIMQEKNPVHVIGVEEPSVGASMLFDIREST

SEQ ID NO: 16433 - protein, 273 aa, Homo Sapiens
MSPKRDGLGTGDGLHSQVLQEQVSTGDNLHECDSQGPSKDTLVREGKTYKCKECGSVFNKNSLLVRHQQIHTGVKPYECQECGKAFPEKVDFVRPMRIHTGEKPCKCVECGKVFNRRSHLLCYRQIHTGEKPYECSECGKTFSYHSVFIQHRVTHTGEKLFGCKECGKTFYYNSSLTRHMKIHTGEKPCKCSECGKTFTYRSVFFRHSMTHTAGKPYECKECGKGFYYSYSLTRHTRSHTGEKPYECLEHRKDFGYHSAFAQQSKIHSGGKNL

SEQ ID NO: 16434 - protein, 664 aa, Homo Sapiens
MPLRDKYCQTDHHHHGCCEPVYILEPGDPPLLQQPLQTSKSGIQQIIECFRSGTKQLKHILLKDVDTIFECKLCRSLFRGLPNLITHKKFYCPPSLQMDDNLPDVNDKQSQAINDLLEAIYPSVDKREYIIKLEPIETNQNAVFQYISRTDNPIEVTESSSTPEQTEVQIQETSTEQSKTVPVTDTEVETVEPPPVEIVTDEVAPTSDEQPQESQADLETSDNSDFGHQLICCLCRKEFNSRRGVRRHIRKVHKKKMEELKKYIETRKNPNQSSKGRSKNVLVPLSRSCPVCCKSFATKANVRRHFDEVHRGLRRDSITPDIATKPGQPLFLDSISPKKSFKTRKQKSSSKAEYNLTACKCLLCKRKYSSQIMLKRHMQIVHKITLSGTNSKREKGPNNTANSSEIKVKVEPADSVESSPPSITHSPQNELKGTNHSNEKKNTPAAQKNKVKQDSESPKSTSPSAAGGQQKTRKPKLSAGFDFKQLYCKLCKRQFTSKQNLTKHIELHTDGNNIYVKFYKCPLCTYETRRKRDVIRHITVVHKKSSRYLGKITASLEIRAIKKPIDFVLNKVAKRGPSRDEAKHSDSKHDGTSNSPSKKYEVADVGIEVKVTKNFSLHRCNKCGKAFAKKTYLEHHKKTHKANASNSPEGNKTKGRSTRSKALV

SEQ ID NO: 16435 - protein, 1209 aa, Homo Sapiens
MECYYIVISSTHLSNGHFRNIKGVFRGPLSKNGNKTLDYAEKENTIAKALEDLKANFYCELCDKQYYKHQEFDNHINSYDHAHKQRLKELKQREFARNVASKSRKDERKQEKALQRLHKLAELRKETVCAPGSGPMFKSTTVTVRENCNEISQRVVVDSVNNQQDFKYTLIHSEENTKDATTVAEDPESANNYTAKNNQVGDQAQGIHRHKIGFSFAFPKKASVKLESSAAAFSEYSDDASVGKGFSRKSRFVPSACHLQQSSPTDVLLSSEEKTNSFHPPEAMCRDKETVQTQEIKEVSSEKDALLLPSFCKFQLQLSSDADNCQNSVPLADQIPLESVVINEDIPVSGNSFELLGNKSTVLDMSNDCISVQATTEENVKHNEASTTEVENKNGPETLAPSNTEEVNITIHKKTNFCKRQCEPFVPVLNKHRSTVLQWPSEMLVYTTTKPSISYSCNPLCFDFKSTKVNNNLDKNKPDLKDLCSQQKQEDICMGPLSDYKDVSTEGLTDYEIGSSKNKCSQVTPLLADDILSSSCDSGKNENTGQRYKNISCKIRETEKYNFTKSQIKQDTLDEKYNKIRLKETHEYWFHKSRRKKKRKKLCQHHHMEKTKESETRCKMEAENSYTENAGKYLLEPISEKQYLAAEQLLDSHQLLDKRPKSESISLSDNEEMCKTWNTEYNTYDTISSKNHCKKNTILLNGQSNATMIHSGKHNLTYSRTYCCWKTKMSSCSQDHRSLVLQNDMKHMSQNQAVKRGYNSVMNESERFYRKRRQHSHSYSSDESLNRQNHLPEEFLRPPSTSVAPCKPKKKRRRKRGRFHPGFETLELKENTDYPVKDNSSLNPLDRLISEDKKEKMKPQEVAKIERNSEQTNQLRNKLSFHPNNLLPSETNGETEHLEMETTSGELSDVSNDPTTSVCVASAPTKEAIDNTLLEHKERSENINLNEKQIPFQVPNIERNFRQSQPKSYLCHYELAEALPQGKMNETPTEWLRYNSGILNTQPPLPFKEAHVSGHTFVTAEQILAPLALPEQALLIPLENHDKFKNVPCEVYQHILQPNMLANKVKFTFPPAALPPPSTPLQPLPLQQSLCSTSVTTIHHTVLQQHAAAAAAAAAAAAAGTFKVLQPHQQFLSQIPALTRTSLPQLSVGPVGPRLCPGNQPTFVAPPQMPIIPASVLHPSHLAFPSLPHALFPSLLSPHPTVIPLQPLF

SEQ ID NO: 16436 - protein, 1349 aa, Homo Sapiens
MACYLVISSRHLSNGHYRGIKGVFRGPLCKNGSPSPDFAEKKSTAKALEDVKANFYCELCDKQYHKHQEFDNHINSYDHAHKQRLKELKQREFARNVASKSWKDEKKQEKALKRLHQLAELRQQSECVSGNGPAYKAPRVAIEKQLQQGIFPIKNGRKVSCMKSALLLKGKNLPRIISDKQRSTMPNRHQLQSDRRCLFGNQVLQTSSDLSNANHRTGVSFTFSKKVHLKLESSASVFSENTEETHDCNKSPIYKTKQTADKCKCCRFANKDTHLTKEKEVNISPSHLESVLHNTISINSKILQDKHDSIDETLEDSIGIHASFSKSNIHLSDVDFTPTSREKETRNTLKNTLENCVNHPCQANASFSPPNIYNHSDARISECLDEFSSLEPSEQKSTVHLNPNSRIENREKSLDKTERVSKNVQRLVKEACTHNVASKPLPFLHVQSKDGHTTLQWPTELLLFTKTEPCISYGCNPLYFDFKLSRNTKEDHNLEDLKTELGKKPLELKTKRESQVSGLTEDQQKLIQEDYQYPKPKTMIANPDWEKFQRKYNLDYSDSEPNKSEYTFSANDLEMKNPKVPLYLNTSLKDCAGKNNSSENKLKEASRAHWQGCRKAVLNDIDEDLSFPSYISRFKKHKLIPCSPHLEFEDERQFNCKSSPCTVGGHSDHGKDFSVILKSNHISMTSKVSGCGNQRYKRYSPQSCLSRYSSSLDTSPSSMSSLRSTCSSHRFNGNSRGNLLCFHKREHHSVERHKRKCLKHNCFYLSDDITKSSQMQSEPQKERNCKLWESFKNEKYSKRRYCHCRERQKLGKNQQQFSGLKSTRIIYCDSNSQISCTGSSKKPPNCQGTQHDRLDSYSIEKMYYLNKSKRNQESLGSPHICDLGKVRPMKCNSGNISCLLKNCSSGPSETTESNTAEGERTPLTAKILLERVQAKKCQEQSSNVEISSNSCKSELEAPSQVPCTIQLAPSGCNRQALPLSEKIQYASESRNDQDSAIPRTTEKDKSKSSHTNNFTILADTDCDNHLSKGIIHLVTESQSLNIKRDATTKEQSKPLISEIQPFIQSCDPVPNEFPGAFPSNKYTGVTDSTETQEDQINLDLQDVSMHINHVEGNINSYYDRTMQKPDKVEDGLEMCHKSISPPLIQQPITFSPDEIDKYKILQLQAQQHMQKQLLSKHLRVLPAAGPTAFSPASTVQTVPVHQHTSITTIHHTFLQHFAVSASLSSHSSHLPIAHLHPLSQAHFSPISFSTLTPTIIPAHPTFLAGHPLHLVAATPFHPSHITLQPLPPTAFIPTLFGPHLNPATTSIIHLNPLIQPVFQGQDFCHHSCSSQMQQLNEVKEALNVSTHLN

SEQ ID NO: 16437 - protein, 627 aa, Homo Sapiens
MAMALTDPAQVSVTFDDVAVTFTQEEWGQLDLAQRTLYQEVMLENCGLLVSLGCPVPRPELIYHLEHGQEPWTRKEDLSQGTCPGDKGKPKSTEPTTCELALSEGISFWGQLTQGASGDSQLGQPKDQDGFSEMQGERLRPGLDSQKEKLPGKMSPKHDGLGTADSVCSRIIQDRVSLGDDVHDCDSHGSGKNPVIQEEENIFKCNECEKVFNKKRLLARHERIHSGVKPYECTECGKTFSKSTYLLQHHMVHTGEKPYKCMECGKAFNRKSHLTQHQRIHSGEKPYKCSECGKAFTHRSTFVLHNRSHTGEKPFVCKECGKAFRDRPGFIRHYIIHSGENPYECFECGKVFKHRSYLMWHQQTHTGEKPYECSECGKAFCESAALIHHYVIHTGEKPFECLECGKAFNHRSYLKRHQRIHTGEKPYVCSECGKAFTHCSTFILHKRAHTGEKPFECKECGKAFSNRADLIRHFSIHTGEKPYECMECGKAFNRRSGLTRHQRIHSGEKPYECIECGKTFCWSTNLIRHSIIHTGEKPYECSECGKAFSRSSSLTQHQRMHTGRNPISVTDVGRPFTSGQTSVNIQELLLGKNFLNVTTEENLLQEEASYMASDRTYQRETPQVSSL

SEQ ID NO: 16438 - protein, 589 aa, Homo Sapiens
MIKFQERVTFKDIAVIFTKEELAVLDKAQINLYQDVMLENFRNFISVDGIKNNILNLQGKGLIYLSQEELHCWKIWKQRIRDLSVSQDYIMNLQEQCSPHLEDVSLCEEWAGMSLQISENENYVVNAIIKNQDITAWQSLTQVLTPESWRKANIMTEPQKSQGRYKGIYVEEKLYRHARHDESLNWTSRDHHESQECKGEDPGRHPNCGKNLGMKSTVEQHHAVHVLPQPFTCNNCGVAFADDTDPRVHHSTHLGEKSYKCDQYGKNLSQSQYLIVHCKTHSGETPYEFHEWPTGCKQSSDLPRCQKVPSGDNPYKCKECGKGFRCNSSLHNHHRVHTGEMPYKCHVCGKAFGFRSLPCIHQGVHTGKKPYKCEDCGKGFEQSSNLLIHQRVHTGEKPYKSSECGKCFSSSSVLQVHWRFHTGEKPYRCGECGKGFSQSTHLHIHQRVHTGEKQYNAMCVERILGIVLFFTLIREFTLQKNHINAKCVESALVTVHIFTSIKAITQERNHINVMSVVKASVGIQIFNVHLRVHRGQRPCKCKACGKGFSRNSHLLAQQRVRIDKTQYTHCEHGKDLLTHQRLHEQRETL

SEQ ID NO: 16439 - protein, 903 aa, Homo Sapiens
MLREEAAQKRKGKESGMALPQGRLTFRDVAIEFSLAEWKFLNPAQRALYREVMLENYRNLEAVDISSKHMMKEVLSTGQGNREVIHTGTLQRHQSYHIGDFCFQEIEKEIHNIEFQCQEDERNGHEAPTTKIKKLTGSTDQHDHRHAGNKPIKDQLGSSFYSHLPELHIFQIKGEIANQLEKSTSDASSVSTSQRISCRPQIHISNNYGNNPLNSSLLPQKQEVHMREKSFPCNESGKAFNCSSLLRKHQIPHLGDKQYKCDVCGKLFNHKQYLACHRRCHTGEKPYKCKECGKSFSYKSSLTCHHRLHTGVKPYKCNECGKVFRQNSALVIHKAIHTGEKPYKCNECGKAFNQQSHLSRHQRLHTGVKPYKCKICEKAFACHSYLANHTRIHSGEKTYKCNECGKAFNHQSSLARHHILHTGEKPYKCEECDKVFSQKSTLERHKRIHTGEKPYKCKVCDTAFTCNSQLARHRRIHTGEKTYKCNECRKTFSRRSSLLCHRRLHSGEKPYKCNQCGNTFRHRASLVYHRRLHTLEKSYKCTVCNKVFMRNSVLAVHTRIHTAKKPYKCNECGKAFNQQSHLSRHRRLHTGEKPYKCEACDKVFGQKSALESHKRIHTGEKPYRCQVCDTAFTWNSQLARHTRIHTGEKTYKCNECGKTFSYKSSLVWHRRLHGGEKSYKCKVCDKAFVCRSYVAKHTRIHSGMKPYKCNECSKTFSNRSSLVCHRRIHSGEKPYKCSECSKTFSQKATLLCHRRLHSGEKPYKCNDCGNTFRHWSSLVYHRRLHTGEKSYKCTVCDKAFVRNSYLARHIRIHTAEKPYKCNECGKAFNEQSHLSRHHRIHTGEKPYKCEACDKVFSRKSHLKRHRIIHTGEKPYKCNECGKAFSDRSTLIHHQAIHGIGKFD

SEQ ID NO: 16440 - protein, 661 aa, Homo Sapiens
MPANEDAPQPGEHGSACEVSVSFEDVTVDFSREEWQQLDSTQRRLYQDVMLENYSHLLSVGFEVPKPEVIFKLEQGEGPWTLEGEAPHQSCSDGKFGIKPSQRRISGKSTFHSEMEGEDTRDDSLYSILEELWQDAEQIKRCQEKHNKLLSRTTFLNKKILNTEWDYEYKDFGKFVHPSPNLILSQKRPHKRDSFGKSFKHNLDLHIHNKSNAAKNLDKTIGHGQVFTQNSSYSHHENTHTGVKFCERNQCGKVLSLKHSLSQNVKFPIGEKANTCTEFGKIFTQRSHFFAPQKIHTVEKPHELSKCVNVFTQKPLLSIYLRVHRDEKLYICTKCGKAFIQNSELIMHEKTHTREKPYKCNECGKSFFQVSSLLRHQTTHTGEKLFECSECGKGFSLNSALNIHQKIHTGERHHKCSECGKAFTQKSTLRMHQRIHTGERSYICTQCGQAFIQKAHLIAHQRIHTGEKPYECSDCGKSFPSKSQLQMHKRIHTGEKPYICTECGKAFTNRSNLNTHQKSHTGEKSYICAECGKAFTDRSNFNKHQTIHTGEKPYVCADCGRAFIQKSELITHQRIHTTEKPYKCPDCEKSFSKKPHLKVHQRIHTGEKPYICAECGKAFTDRSNFNKHQTIHTGDKPYKCSDCGKGFTQKSVLSMHRNIHT

SEQ ID NO: 16441 - protein, 617 aa, Homo Sapiens
MALPQGLLTFRDVAIEFSQEEWKCLDPAQRTLYRDVMLENYRNLVSLDISSKCMMKEFSSTAQGNREVIHTGTLQRHESHHTGDFRFQEIDKDIHNLEFQWQEDERNSHEAPMTEIKKLTGSADRYDQRHAGNKPIKDQLGSSFHSHLPELHMFQTQGKIGNQVEKSINDASSISTSQRISCRPKTHISNNYGNNFRNSSLLTQKQEVHMREKSFQCNESGKAFNYSSLLRKHQIIHLGEKQYKCDVCGKVFNRKRNLVCHRRCHTGEKPYRCNECGKTFSQTYSLTCHRRLHTGEKPYKCEECDKAFSFKSNLKRHRRIHAGEKPYKCNECGKTFSQTSSLTCHRRLHTGEKPFKCNECGKTFSRKSSLTCHHRLHTGEKPYKCNECGKTFSQELTLKCHRRLHTGEKPYKCNECGKVFNKKANLARHHRLHSGEKPYKCTECVKTFSRNSALVIHKAIHIGEKRYKCNECGKTFSRISALVIHTAIHTGEKPYKCNECGKGFNRKTHLACHHRLHTGEKPYKCNECGKVFNRKTHLAHHHRLHTGDKPYKCNECGKVFNQKAHLARHHRLHTGEKPYKCNECGKVFNQKANLARHHRLHTGEKPYKFNECGKAFN

SEQ ID NO: 16442 - protein, 855 aa, Homo Sapiens
MAAAATLRLSAQGTVTFEDVAVNFTWEEWNLLSEAQRCLYRDVTLENLALISSLGCWCGVEDEAAPSKQSIYIQRETQVRTPMAGVSPKKAHPCEMCGPILGDILHVADHQGTHHKQKLHRCEAWGNKLYDSGNFHQHQNEHIGEKPYRGSVEEALFAKRCKLHVSGESSVFSESGKDFLPRSGLLQQEASHTGEKSNSKTECVSPIQCGGAHYSCGESMKHFSTKHILSQHQRLLTREECYVCCECGKSFSKYASLSNHQRVHTEKKHECGECGKSFSKYVSFSNHQRVHTEKKHECGECGKSFSKYVSFSNHQRVHTGKRPYECGECGKSFSKYASFSNHQRVHTEKKHYECGECGKSFSKYVSFSNHQRVHTGKRPYECGECGKSFSKYASFSNHQRVHTDKKHYECGECGKSFSQKSSLIQHQRFHTGEKPYGCEECGKSFSSEGHLRSHQRVHAGERPFKCGECVKSFSHKRSLVHHQRVHSGERPYQCGECGKSFSQKGNLVLHQRVHTGARPYECGECGKSFSSKGHLRNHQQIHTGDRLYECGECGKSFSHKGTLILHQRVHPRERSYGCGECGKSFSSIGHLRSHQRVHTGERPYECGECGKSFSHKRSLVHHQRMHTGERPYKCGDCGKSFNEKGHLRNHQRVHTTERPFKCGECGKCFSHKGNLILHQHGHTGERPYVCRECGKLFKKKSHLLVHQRIHNGEKPYACEACQKFFRNKYQLIAHQRVHTGERPYECNDCGKSFTHSSTFCVHKRIHTGEKPYECSECGKSFAESSSFTKHKRVHTGEKPYECSECGKSFAESSSLTKHKRVHTGEKPYKCEKCGKLFNKKSHLLVHQSSHWRKAI

SEQ ID NO: 16443 - protein, 651 aa, Homo Sapiens
MLREEATKKSKEKEPGMALPQGRLTFRDVAIEFSLEEWKCLNPAQRALYRAVMLENYRNLEFVDSSLKSMMEFSSTRHSITGEVIHTGTLQRHKSHHIGDFCFPEMKKDIHHFEFQWQEVERNGHEAPMTKIKKLTGSTDRSDHRHAGNKPIKDQLGLSFHSHLPELHMFQTKGKISNQLDKSIGASSASESQRISCRLKTHISNKYGKNFLHSSFTQIQEICMREKPCQSNECGKAFNYSSLLRRHHITHSREREYKCDVCGKIFNQKQYIVYHHRCHTGEKTYKCNECGKTFTQMSSLVCHRRLHTGEKPYKCNECGKTFSEKSSLRCHRRLHTGEKPYKCNECGKTFGRNSALVIHKAIHTGEKPYKCNECGKTFSQKSSLQCHHILHTGEKPYKCEECDNVYIRRSHLERHRKIHTGEGSYKCKVCDKVFRSDSYLAEHQRVHTGEKPYKCNKCGRSFSRKSSLQYHHTLHTGEKPYTCNECGKVFSRRENLARHHRLHAGEKPYKCEECDKVFSRRSHLERHRRIHTGEKPYKCKVCDKAFRSDSCLANHTRVHTGEKPYKCNKCAKVFNQKGILAQHQRVHTGEKPYKCNECGKVFNQKASLAKHQRVHTAEKPYKCNECGKAFTGQSTLIHHQAIHGCRETLQM

SEQ ID NO: 16444 - protein, 412 aa, Homo Sapiens
MSRRKQTNPNKVHWDQVFAGLEEQARQAMMKTDFPGDLGSQRQAIQQLRDQDSSSSDSEGDEEETTQDEVSSHTSEEDGGVVKVEKELENTEQPVGGNEVVEHEVTGNLNSDPLLELCQCPLCQLDCGSREQLIAHVYQHTAAVVSAKSYMCPVCGRALSSPGSLGRHLLIHSEDQRSNCAVCGARFTSHATFNSEKLPEVLNMESLPTVHNEGPSSAEGKDIAFSPPVYPAGILLVCNNCAAYRKLLEAQTPSVRKWALRRQNEPLEVRLQRLERERTAKKSRRDNETPEEREVRRMRDREAKRLQRMQETDEQRARRLQRDREAMRLKRANETPEKRQARLIREREAKRLKRRLEKMDMMLRAQFGQDPSAMAALAAEMNFFQLPVSGVELDSQLLGKMAFEEQNSSSLH

SEQ ID NO: 16445 - protein, 610 aa, Homo Sapiens
MDSVAFEDVAVNFTQEEWALLGPSQKSLYRNVMQETIRNLDCIEMKWEDQNIGDQCQNAKRNLRSHTCEIKDDSQCGETFGQIPDSIVNKNTPRVNPCDSGECGEVVLGHSSLNCNIRVDTGHKSCEHQEYGEKPYTHKQRGKAISHQHSFQTHERPPTGKKPFDCKECAKTFSSLGNLRRHMAAHHGDGPYKCKLCGKAFVWPSLFHLHERTHTGEKPYECKQCSKAFPFYSSYLRHERIHTGEKAYECKQCSKAFPDYSTYLRHERTHTGEKPYKCTQCGKAFSCYYYTRLHERTHTGEQPYACKQCGKTFYHHTSFRRHMIRHTGDGPHKCKICGKGFDCPSSVRNHETTHTGEKPYECKQCGKVLSHSSSFRSHMITHTGDGPQKCKICGKAFGCPSLFQRHERTHTGEKPYQCKQCGKAFSLAGSLRRHEATHTGVKPYKCQCGKAFSDLSSFQNHETTHTGEKPYECKECGKAFSCFKYLSQHKRTHTVEKPYECKTCRKAFSHFSNLKVHERIHSGEKPYECKECGKAFSWLTCLLRHERIHTGEKPYECLQCGKAFTRSRFLRGHEKTHTGEKLYECKECGKALSSLRSLHRHKRTHWKDTL

SEQ ID NO: 16446 - protein, 1081 aa, Homo Sapiens
MPRRKQEQPKRLPSHVSRQEEAEGELSEGEHWYGNSSETPSEASYGEVQENYKLSLEDRIQEQSTSPDTSLGSTTPSSHTLELVALDSEVLRDSLQCQDHLSPGVSSLCDDDPGSNKPLSSNLRRLLEAGSLKLDAAATANGRVESPVNVGSNLSFSPPSHHAQQLSVLARKLAEKQEQNDQYTPSNRFIWNQGKWLPNSTTTCSLSPDSAILKLKAAANAVLQDKSLTRTEETMRFESFSSPFSSQSASSTLAALSKKVSERSLTPGQEHPPPASSFLSLASMTSSAALLKEVAARAAGSLLAEKSSLLPEDPLPPPPSEKKPEKVTPPPPPPPPPPPPPPPQSLELLLLPVPKGRVSKPSNSASEEESGKPFQCPICGLVIKRKSYWKRHMVIHTGLKSHQCPLCPFRCARKDNLKSHMKVHQHQDRGETFQCQLCPFTSSRHFSLKLHMRCHQHFLRTEAKVKEEIPDPDVKGSPHLSDSACLGQQREGGGTELVGTMMTSNTPERTSQGGAGVSPLLVKEEPKEDNGLPTSFTLNAADRPANHTKLKDPSEYVANSASALFSQDISVKMASDFLMKLSAANQKEPMNLNFKVKEEPKEGESLSTTLPRSSYVFSPESEVSAPGVSEDALKPQEGKGSVLRRDVSVKAASELLMKLSAESYKETQMVKIKEEPMEVDIQDSHVSISPSRNVGYSTLIGREKTEPLQKMPEGRVPPERNLFSQDISVKMASELLFQLSEKVSKEHNHTKENTIRTTTSPFFSEDTFRQSPFTSNSKELLPSDSVLHGRISAPETEKIVLEAGNGLPSWKFNDQLFPCDVCGKVFGRQQTLSRHLSLHTEERKYKCHLCPYAAKCRANLNQHLTVHSVKLVSTDTEDIVSAVTSEGSDGKKHPYYYSCHVCGFETELNVQFVSHMSLHVDKEQWMFSICCTACDFVTMEEAEIKTHIGTKHTGEDRKTPSESNSPSSSSLSALSDSANSKDDSDGSQKNKGGNNLLVISVMPGSQPSLNSEEKPEKGFECVFCNFVCKTKNMFERHLQIHLITRMFECDVCHKFMKTPEQLLEHKKCHTVPTGGLNSGQW

SEQ ID NO: 16447 - protein, 432 aa, Homo Sapiens
MPHSPLISIPHVWCHPEEEERMHDELLQAVSKGPVMFRDVSIDFSQEEWECLDADQMNLYKEVMLENFSNLVSVGLSNSKPAVISLLEQGKEPWMVDRELTRGLCSDLESMCETKILSLKKRHFSQVIITREDMSTFIQPTFLIPPQKTMSEEKPWECKICGKTFNQNSQFIQHQRIHFGEKHYESKEYGKSFSRGSLVTRHQRIHTGKKPYECKECGKAFSCSSYFSQHQRIHTGEKPYECKECGKAFKYCSNLNDHQRIHTGEKPYECKVCGKAFTKSSQLFLHLRIHTGEKPYECKECGKAFTQHSRLIQHQRMHTGEKPYECKQCGKAFNSASTLTNHHRIHAGEKLYECEECRKAFIQSSELIQHQRIHTDEKPYECNECGKAFNKGSNLTRHQRIHTGEKPYDCKECGKAFGSRSDLIRHEGIHTG

SEQ ID NO: 16448 - protein, 516 aa, Homo Sapiens
MHGRKDDAQKQPVKNQLGLNPQSHLPELQLFQAEGKIYKYDHMEKSVNSSSLVSPPQRISSTVKTHISHTYECNFVDSLFTQKEKANIGTEHYKCSERGKAFHQGLHFTIHQIIHTKETQFKCDICGKIFNKKSNLASHQRIHTGEKPYKCNECGKVFHNMSHLAQHRRIHTGEKPYKCNECGKVFNQISHLAQHQRIHTGEKPYKCNECGKVFHQISHLAQHRTIHTGEKPYECNKCGKVFSRNSYLVQHLIIHTGEKPYRCNVCGKVFHHISHLAQHQRIHTGEKPYKCNECGKVFSHKSSLVNHWRIHTGEKPYKCNECGKVFSHKSSLVNHWRIHTGEKPYKCNECGKVFSRNSYLAQHLIIHAGEKPYKCDECDKAFSQNSHLVQHHRIHTGEKPYKCDECGKVFSQNSYLAYHWRIHTGEKAYKCNECGKVFGLNSSLAHHRKIHTGEKPFKCNECGKAFSMRSSLTNHHAIHTGEKHFKCNECGKLFRDNSYLVRHQRFHAGKKSNTCN

SEQ ID NO: 16449 - protein, 372 aa, Homo Sapiens
MASSASARTPAGKRVINQEELRRLMKEKQRLSTSRKRIESPFAKYNRLGQLSCALCNTPVKSELLWQTHVLGKQHREKVAELKGAKEASQGSSASSAPHSVKRKAPDADDQDVKRAKATLVPQVQPSTSAWTTNFDKIGKEFIRATPSKPSGLSLLPDYEDEEEEEEEEEGDGERKRGDASKPLSDAQGKEHSVSSSREVTSSVLPNDFFSTNPPKAPIIPHSGSIEKAEIHEKVVERRENTAEALPEGFFDDPEVDARVRKVDAPKDQMDKEWDEFQKAMRQVNTISEAIVAEEDEEGRLDRQIGEIDEQIECYRRVEKLRNRQDEIKNKLKEILTIKELQKKEEENADSDDEGELQDLLSQDWRVKGALL

SEQ ID NO: 16450 - protein, 1677 aa, Homo Sapiens
MEVPEPTCPAPPARDQPAPTPGPPGAPGGQASPHLTLGPVLLPPEQGLAPPTVFLKALPIPLYHTVPPGGLQPRAPLVTGSLDGGNVPFILSPVLQPEGPGPTQVGKPAAPTLTVNIVGTLPVLSPGLGPTLGSPGKVRNAGKYLCPHCGRDCLKPSVLEKHIRSHTGERPFPCATCGIAFKTQSNLYKHRRTQTHLNNSRLSSESEGAGGGLLEEGDKAGEPPRPEGRGESRCQGMHEGASERPLSPGAHVPLLAKNLDVRTEAAPCPGSAFADREAPWDSAPMASPGLPAASTQPWRKLPEQKSPTAGKPCALQRQQATAAEKPWDAKAPEGRLRKCESTDSGYLSRSDSAEQPHAPCSPLHSLSEHSAESEGEGGPGPGPGVAGAEPGAREAGLELEKKRLEERIAQLISHNQAVVDDAQLDNVRPRKTGLSKQGSIDLPTPYTYKDSFHFDIRALEPGRRRAPGPVRSTWTPPDKSRPLFFHSVPTQLSTTVECVPVTRSNSLPFVEGSRTWLEPREPRDPWSRTQKPLSPRPGPARLGCRSGLSSTDVPSGHPRALVRQAAVEDLPGTPIGDALVPAEDTDAKRTAAREAMAGKGRAGGRKCGQRRLKMFSQEKWQVYGDETFKRIYQKMKASPHGGKKAREVGMGSGAELGFPLQKEAAGSSGTVPTQDRRTPVHEDISAGATPEPWGNPPALEASLVTEPTKHGETVARRGDSDRPRVEEAVSSPALGGRDSPCSGSRSPLVSPNGRLELGWQMPPAPGPLKGGDVEAPRPVWPDPKLEGGARGVGDVQETCLWAQTVLRWPSRGSGEDKLPSERKKLKVEDLHSWKQPEPVSAETPGGPTQPASLSSQKQDADPGEVPGGSKESARQVGEPLESSGASLAAASVALKRVGPRDKATPLHPAAPAPAEHPSLATPPQAPRVLSALADNAFSPKYLLRLPQAETPLPLPIPWGPRHSQDSLCSSGWPEERASFVGSGLGTPLSPSPASGPSPGEADSILEDPSCSRPQDGRKGAQLGGDKGDRMATSRPAARELPISAPGAPREATSSPPTPTCEAHLVQDMEGDSHRIHRLCMGSTLARARLSGDVLNPWVPNWELGEPPGNAPEDPSSGPLVGPDPCSPLQPGSFLTALTRPQGVPPGWPELALSSHSGTSRSHSTRSPHSTQNPFPSLKAEPRLTWCCLSRSVPLPAEQKAKAASVYLAVHFPGSSLRDEGPNGPPGSNGGWTWTSPGEGGPAQMSKFSYPTVPGVMPQHQVSEPEWKKGLPWRAKMSRGNSKQRKLKINPKRYKGNFLQSCVQLRASRLRTPTWVRRRSRHPPALEGLKPCRTPGQTSSEIAGLNLQEEPSCATSESPPCCGKEEKKEGDCRQTLGTLSLGTSSRIVREMDKRTVKDISPSAGEHGDCTTHSTAATSGLSLQSDTCLAVVNDVPLPPGKGLDLGLLETQLLASQDSVSTDPKPYIFSDAQRPSSFGSKGTFPHHDIATSVAAVCISLPVRTDHIAQEIHSAESRDHSQTAGRTLTSSSPDSKVTEEGRAQTLLPGRPSSGQRISDSVPLESTEKTHLEIPASGPSSASSHHKEGRHKTFFPSRGQYGCGEMTVPCPSLGSDGRKRQVSGLITRKDSVVPSKPEQPIEIPEAPSKSLKKRSLEGMRKQTRVEFSDTSSDDEDRLVIEI

SEQ ID NO: 16451 - protein, 187 aa, Homo Sapiens
MVMHSEDEPYKCKFCGKAFDNLHLYLTHERTHTGEKPYECNKCGKAFSCSSSIRKHARIHTGEKPYICKQCGKAFRYSSSIRNHENTHTGEKPCECKQCGKAFSYSSYFRIHERIHTGEQVYKCKECGKTFTYPSAFHKHKSTHTSQKLYECKECGKAFDCFSSFHSHEGVHTGEKPYECRTWKSLQ

SEQ ID NO: 16452 - protein, 537 aa, Homo Sapiens
MEGLLSVALQGAELEGNWKHEGQVEDLQENQESCPEPEAVACKGDPAGDSMQERDEFSRIPRTISSPAATQASVPDDSSSRRCSAPGESPKERHPDSRQRERGGGPKKPWKCGDCGKAFSYCSAFILHQRIHTGEKPFACPECGKAFSQSVHLTLHQRTHTGEKPYACHECGKAFSQGSYLASHWRTHTGEKPHRCADCGKAFTRVTHLTQHRRVHTGERPYACAQCAKAFRNRSSLIEHQRIHTGEKPYECSACAKAFRFSSALIRHQRIHTEEKPYRCGQCAKAFAQIAHLTQHRRVHTGEKPYTCQDCGALFSQSASLAEHRRIHTGEKPYACGQCAKAFTQVSHLTQHQRTHTGERPYPCHDCGKRFSNRSHLLQHRLVHTGERPYRCLQCGAAFSHVSSLIEHQKIHTGERPYKCGECGKAFSQGSSLALHQRTHTGERPYTCPECGKAFSNRSYLIQHHIVHTGEKPYECSGCGKAFSFSSALIRHQRTHADSSGRLCPAPTPDSTPGLSQGGETCQQGCPGRNPRGPAED

SEQ ID NO: 16453 - protein, 936 aa, Homo Sapiens
MALTQGPLTFRDVAIEFSQEEWKSLDPVQKALYWDVMLENYRNLVFLGILPKCMTKELPPIGNSNTGEKCQTVTLERHECYDVENFYLREIQKNLQDLEFQWKDGEINYKEVPMTYKNNLNGKRGQHSQEDVENKCIENQLTLSFQSRLTELQKFQTEGKIYECNQSEKTVNNSSLVSPLQRILPSVQTNISKKYENEFLQLSLPTQLEKTHIREKPYMCKGCGKAFRVSSSLINHQMVHTTEKPYKCNECGKAFHRGSLLTIHQIVHTRGKPYQCGVCGKIFRQNSDLVNHRRSHTGEKPYKCNECGKSFSQSYNLAIHQRIHTGEKPYKCNECGKTFKQGSCLTTHQIIHTGEKPYQCDICGKVFRQNSNLVNHQRIHTGEKPYKCNICGKSFSQSSNLATHQTVHSGNKPYKCDECGKTFKRSSSLTTHQIIHTGEKPYTCDVCDKVFSQRSQLARHQRSHTGEKPYKCNECGKVFSQTSHLVGHRRIHTGEKPYKCDKCGKAFKQGSLLTRHKIIHTREKRYQCGECGKVFSENSCLVRHLRIHTGEQPYKCNVCGKVFNYSGNLSIHKRIHTGEKPFQCNECGTVFRNYSCLARHLRIHTGQKPYKCNVCGKVFNDSGNLSNHKRIHTGEKPFQCNECGKVFSYYSCLARHRKIHTGEKPYKCNDCGKAYTQRSSLTKHLIIHTGEKPYNCNEFGGAFIQSSKLARYHRNPTGEKPHKCSHCGRTFSHITGLTYHQRRHTGEMPYKCIECGQVFNSTSNLARHRRIHTGEKPYKCNECGKVFRHQSTLARHRSIHTGEKPYVCNECGKAFRVRSILVNHQKMHTGDKPYKCNECGKAFIERSKLVYHQRNHTGEKPYKCIECGKAFGRFSCLNKHQMIHSGEKPYKCNECGKSFISRSGLTKHQTKHTAESLKTKFNVEKPLDVLLTSGFK

SEQ ID NO: 16454 - protein, 531 aa, Homo Sapiens
MEAPAQKAGQGGLPKADAQGASGAREKRPEEPRPLEEDRAGSRPTQKGDLRGAAGGRTTPPGGGSRGCSLGVSPGPGTRHSAGTRPLVREPCGPTSSQNPELVIPEGLQAREGPCRSPARGGDCSRNSCLAWHRGAPAGETPPVCDPCPERIQNHPRTQLCEVHTDCWPCQPGTGAPTCPRTPKPTSRGRNPLVEQPRACACGEAFAWRALRIPQERLQATEEPRPCARCGKRFRPNQQQQAGKSPPVCPECGQTSRPRPIVPDPPAQRLYACDECGKAFTRTSSLLQHQRIHTGERPYECAECGKAFVRCSGLYRHQKTHSAERHRRGPVLARRAFRLGCPPCGDYSERSPRRGSGAGEKPYECADCAKAFGLFSHLVEHRRVHTGEKPYACPECGKAFNQRSNLSRHQRTHSSAKPYACPLCEKAFKGRSGLVQHQRAHTGERPYGCSECGKTFRGCSELRQHERLHSGEKPYICRDCGKAFVRNCSLVRHLRTHTGERPYACGDCGRAFSQRSNLNEHRKRHGGRAAP

SEQ ID NO: 16455 - protein, 811 aa, Homo Sapiens
MLLPTTIQPQTARKSQLPRGNSCLVGLHIASPQLLRVQPLVRTEPQSCFLSDLCQPPAQGFVQRPLPALQVVPAKRVPAPKAPDEQGSMLTPLSASDPLAVTSLSSSSAHPFISNLHTRHTEKLKKSLKVKTRSGRVSRPPKYKAKDYKFIKTEDLADGHLSDSDDYSELCVEEDEDQRERHALFDLSSCSLRPKSFKCQTCEKSYIGKGGLARHFKLNPGHGQLDPEMVLSEKASGSTLRGCTEERTLSLTSLGLSMPADPCEGGARSCLVTESARGGLQNGQSVDVEETLPSEPENGALLRSERYQGPRRRACSETLAESRTAVLQQRRAAQLPGGPAAAGEQRASPSKARLKEFLQQCDREDLVELALPQLAQVVTVYEFLLMKVEKDHLAKPFFPAIYKEFEELHKMVKKMCQDYLSSSGLCSQETLEINNDKVAESLGITEFLRKKEIHPDNLGPKHLSRDMDGEQLEGASSEKREREAAEEGLASVKRPRREALSNDTTESLAANSRGREKPRPLHALAAGFSPPVNVTVSPRSEESHTTTVSGGNGSVFQAGPQLQALANLEARRGSIGAALSSRDVSGLPVYAQSGEPRRLTQAQVAAFPGENALEHSSDQDTWDSLRSPGFCSPLSSGGGAESLPPGGPGHAEAGHLGKVCDFHLNHQQPSPTSVLPTEVAAPPLEKILSVDSVAVDCAYRTVPKPGPQPGPHGSLLTEGCLRSLSGDLNRFPCGMEVHSGQRELESVVAVGEAMAFEISNGSHELLSQGQKQIFIQTSDGLILSPPGTIVSQEEDIVTVTDAEGRACGWAR

SEQ ID NO: 16456 - protein, 738 aa, Homo Sapiens
MTMLQESFSFDDLSVDFTQKEWQLLDPSQKNLYKDVMLENYSSLVSLGYEVMKPDVIFKLEQGEEPWVGDGEIPSSDSPEVWKVDGNMMWHQDNQDKLKIIKRGHECDAFGKNFNLNMNFVPLRKSNSEGDLDGLILKHHLDLLIPKGDYGKAESDDFNVFDNFFLHSKPEDTDTWLKYYDCDKYKESYKKSQIIIYHRNRLGEKLYECSECRKRFSKKPSLIKHQSRHIRDIAFGCGNCGKTFPQKSQFITHHRTHTGEKPYNCSQCGKAFSQKSQLTSHQRTHTGEKPYECGECGKAFSRKSHLISHWRTHTGEKPYGCNECGRAFSEKSNLINHQRIHTGEKPFECRECGKAFSRKSQLVTHHRTHTGTKPFGCSDCRKAFFEKSELIRHQTIHTGEKPYECSECRKAFRERSSLINHQRTHTGEKPHGCIQCGKAFSQKSHLISHQMTHTGEKPFICSKCGKAFSRKSQLVRHQRTHTGEKPYECSECGKAFSEKLSLTNHQRIHTGEKPYVCSECGKAFCQKSHLISHQRTHTGEKPYECSECGKAFGEKSSLATHQRTHTGEKPYECRDCEKAFSQKSQLNTHQRIHTGEKPYECSLCRKAFFEKSELIRHLRTHTGEKPYECNECRKAFREKSSLINHQRIHTGEKPFECSECGKAFSRKSHLIPHQRTHTGEKPYGCSECRKAFSQKSQLVNHQRIHTGEKPYRCIECGKAFSQKSQLINHQRTHTVKKS

SEQ ID NO: 16457 - protein, 716 aa, Homo Sapiens
MSLMGHGKVEMLLYAVPLLKAPNCLSSSMQLPHGGGRHQELVRFRDVAVVFSPEEWDHLTPEQRNLYKDVMLDNCKYLASLGNWTYKAHVMSSLKQGKEPWMMEREVTGDPCPACQPALATFRALNESGNAFRQSFHHGEYRTHRTFVQHYECDDCGMAFGHVSQLTGHQKIHKVGETHEYGENTRGFRHRSSFTMLQRICTLYKHFECNQCGETFNRPSKVIQHQSMHSGLKPYKCDVCQKAFRFLSSLSIHQRFHVGNRVNLTRHQKTHTQRKPFSCNFCGKTFHRFSEKTQHLLIHTRKKYYTCNYCKKEFNPYSKFILHQRTHTGEKPHKCDVCEKSFKSISNLNKHQKTHTGEKPFSCNECKKTFAQRTDLARHQQIHTGKKSFICSSCKKTFVRLSDLTQHKGTHTGERPYQCTTCEKAFKYRSNFTKHQKTHSIGRPFACNECGKTYRLNWELNQHKKIHTGEKPYECGECGKRFNNNSNLNKHKKIHTGEKHFVCNQCGKAFSLNSKLSRHQRTHNKKENSSKSVSNLNKHQKTHAGEKPFPCNECKKAFAQRMDLARHQQIHTGRKPFICSSCKKTFVRLSDLTQHKGTHTGERPYQCTTCEKAFKYQSNFTKHQKTHSIGRPFTCNECGKTFRLNWKLNQHKKIHTGEKPYECGECGKCFNNNSNLSKHKKIHTGEKHFVCNQCGKAFSLNSKLSRHQITHNKKKP

SEQ ID NO: 16458 - protein, 808 aa, Homo Sapiens
MLEGHESYDTENFYFREIRKNLQEVDFQWKDGEINYKEGPMTHKNNLTGQRVRHSQGDVENKHMENQLILRFQSGLGELQKFQTAEKIYGCNQIERTVNNCFLASPLQRIFPGVQTNISRKYGNDFLQLSLPTQDEKTHIREKPYIGNECGKAFRVSSSLINHQMIHTTEKPYRCNESGKAFHRGSLLTVHQIVHTRGKPYQCDVCGRIFRQNSDLVNHRRSHTGDKPYICNECGKSFSKSSHLAVHQRIHTGEKPYKCNRCGKCFSQSSSLATHQTVHTGDKPYKCNECGKTFKRNSSLTAHHIIHAGKKPYTCDVCGKVFYQNSQLVRHQIIHTGETPYKCNECGKVFFQRSRLAGHRRIHTGEKPYKCNECGKVFSQHSHLAVHQRVHTGEKPYKCNECGKAFNWGSLLTVHQRIHTGEKPYKCNVCGKVFNYGGYLSVHMRCHTGEKPLHCNKCGMVFTYYSCLARHQRMHTGEKPYKCNVCGKVFIDSGNLSIHRRSHTGEKPFQCNECGKVFSYYSCLARHRKIHTGEKPYKCNDCGKAYTQRSSLTKHLVIHTGENPYHCNEFGEAFIQSSKLARYHRNPTGEKPHKCSECGRTFSHKTSLVYHQRRHTGEMPYKCIECGKVFNSTTTLARHRRIHTGEKPYKCNECGKVFRYRSGLARHWSIHTGEKPYKCNECGKAFRVRSILLNHQMMHTGEKPYKCNECGKAFIERSNLVYHQRNHTGEKPYKCMECGKAFGRRSCLTKHQRIHSSEKPYKCNECGKSYISRSGLTKHQIKHAGENLTTKLNVERPLDVVLTSGIPK

SEQ ID NO: 16459 - protein, 348 aa, Homo Sapiens
MRSLPFALTVESVSARAPTCCSTGRFTQGRQPCKCKACGRGFTQSASLLQHWRVHSDWRETLSLSPVRQDLLWPLQPHQAPASPLGRSHSSAGVRQGFSGQLCCWLTKEHTLAEALRLSPVPAGFWGPVEADRPPANSHRRVCPFCCCSCGDSVNEKTSLSQRVLPHPGEKTCRGGSVESVSLAPSSVAPDSTSGLRPCGSPGSFLQHLPPSTLLPRPPFLYPGPPLSLQPLVPSGLPAVPAVPLGGLEVAQVPPATQPAAQQEGAMGPRSCASAGRDSREAVQAPGYPEPARKASQHRAAGPLGEARARLQRQCRAPPPPSNPHWRGALPVFPVWKASSRRSNLARH

SEQ ID NO: 16460 - protein, 666 aa, Homo Sapiens
MDLVAFEDVAVNFTQEEWSLLDPSQKNLYREVMQETLRNLASIGEKWKDQNIEDQYKNPRNNLRSLLGERVDENTEENHCGETSSQIPDDTLNKKTSPGVKSCESSVCGEVFVGHSSLNRHIRADTAHKPSEYQEYGQEPYKCQQRKKAFRCHPSFQMQEKAHTGEKLYDCKECGKTFISHSSIQRHMIMHNGDGTYKCKFCGKACPCLSIYLIHERVHTGEKPYKCKQCGKAFSYSTSLQIHERTHTGEKPYECKECGKAFGSPNSLYEHRRTHTGEKPYECKQCGKAFRWFHSFQIHERTHSEEKAYECTKCGKAFKCPSYLCRHEVTHSGKKPCECKQCGKALSYLNFQRHMKMHTRMRPYKCKTVEKPLILPVRFEDMKELTLERNLMNASTVVKPSIVPVPFTIMKGLTLERNPMNVSSVVKPSFLPLPFDIMKGLTLERNRMSVSNVGKPSDLPHTFKCMEGLTLKRNPMNVSSVVKPSFFPLPFDIMKGLTLERNPMSVSNVGKPSHLPHTFKCMKGLTLESNCMNLNNVKKPLDLSETFKFMKRHTLERNPIRNMEKHSTISLPFKYMQQCTEDRMPMNVKSVTKHSYLPRSFEYMQEHTLERNPMNVRNAEKRSIIFLLCVYTKGCTLERNHINVRIVGKHSVCLVPFVDIKGLTLE

SEQ ID NO: 16461 - protein, 970 aa, Homo Sapiens
MALSQGLLTFRDVAIEFSQEEWKCLDPAQRTLYRDVMLENYRNLVSLDISSKCMMKEFSSTAQGNTEVIHTGTLQRHERHHIGDFCFQEMEKDIHDFEFQWKEDERNSHEAPMTEIKQLTGSTNRHDQRHAGNKPIKDQLGSSFHSHLPELHMFQTEGKIGNQVEKSINSASLVSTSQRISCRPKTHISKNYGNNFLNSSLLTQKQEVHMREKSFQCNESGKAFNYSSVLRKHQIIHLGAKQYKCDVCGKVFNQKRYLACHRRCHTGKKPYKCNDCGKTFSQELTLTCHHRLHTGEKHYKCSECGKTFSRNSALVIHKAIHTGEKSYKCNECGKTFSQTSYLVYHRRLHTGEKPYKCEECDKAFSFKSNLERHRKIHTGEKPYKCNECSRTFSRKSSLTRHRRLHTGEKPYKCNDCGKTFSQMSSLVYHRRLHTGEKPYKCEECDEAFSFKSNLERHRRIHTGEKPYKCNDCGKTFSQTSSLVYHRRLHTGEKPYKCEECDEAFSFKSNLERHRIIHTGEKLYKCNECGKTFSRKSSLTRHCRLHTGEKPYQCNECGKAFRGQSALIYHQAIHGIGKLYKCNDCHQVFSNATTIANHWRIHNEERSYKCNRCGKFFRHRSYLAVHWRTHSGEKPYKCEECDEAFSFKSNLQRHRRIHTGEKPYRCNECGKTFSRKSYLTCHRRLHTGEKPYKCNECGKTFGRNSALIIHKAIHTGEKPYKCNECGKAFSQKSSLTCHLRLHTGEKPYKCEECDKVFSRKSSLEKHRRIHTGEKPYKCKVCDKAFGRDSHLAQHTRIHTGEKPYKCNECGKNFRHNSALVIHKAIHSGEKPYKCNECGKTFRHNSALEIHKAIHTGEKPYKCSECGKVFNRKANLSRHHRLHTGEKPYKCNKCGKVFNQQAHLACHHRIHTGEKPYKCNECGKTFRHNSVLVIHKTIHTGEKPYKCNECGKVFNRKAKLARHHRIHTGKKH

SEQ ID NO: 16462 - protein, 533 aa, Homo Sapiens
MDSSQHLVTFEDVAVDFTQEEWTLLDQAQRDLYRDVMLENYKNLIILAGSELFKRSLMSGLEQMEELRTGVTGVLQELDLQLKTKGSPLLQDISAERSPNGVQLERSNTAEKLYDSNHSGKVFNEHPFLMTHMITHIGEKTSEDNQSGKALRKNFPHSFYKKSHAEGKMPKCVKHEKAFNQFPNLTRQNKTHTQEKLCECKDCWRTFLNQSSLKLHIRSHNGDKHYVCKECGKAFSNSSHLIGHGRIHSGEKPYVCKECGKAFTQSTGLKLHIRTHSGEKPYKCKECGKAFTHSSYLTDHTRIHSGKKPYVCMECGKAFTRSTGLILHMRIHTGEKPYECKECGKAFIHSSYLTKHVRIHSGEKLYLCKACGKAFTRSSGLVLHMRTHTGEKPYECKECGKAFNNSSMLSQHVRIHTGEKPYECKECGKAFTQSSGLSTHLRTHTGEKACECKECGKAFARSTNLNMHMRTHTGEKPYACKECGKAFRYSTYLNVHTRTHTGAKPYECKKCGKNFTQSSALAKHLRTKACEKT

SEQ ID NO: 16463 - protein, 595 aa, Homo Sapiens
MGPLTFRDVAIEFSLKEWQCLDTAQRNLYRNVMLENYRNLVFLGITVSKPDLITCLEQGKEAWSMKRHEIMVAKPTVMCSHFAQDLWPEQNIKDSFQKVTLKRYGKCRHENLPLRKGCESMDECKMHKGGCNGLNQCLTATQSKIFQCDKYVKVAHKFSNSNRHEIRHTKKKPFKCTKCGKSFGMISCLTEHSRIHTRVNFYKCEECGKAFNWSSTLTKHKRIHTGEKPYKCEECGKAFNQSSNLIKHKKIHTGEKPYKCEECGKTFNRFSTLTTHKIIHTGEKPYKCKECGKAFNRSSTLTTHRKIHTGEKPYKCEECGKAFKQSSNLTTHKIIHTGEKPYKCKKCGKAFNQSAHLTTHEVIHTGEKPYKCEKCGKAFNHFSHLTTHKIIHTGEKPYKCKECGKAFKHSSTLTKHKIIHTGEKPYKCKECEKAFNQSSKLTEHKKIHTGEKPYECEKCGKAFNQSSNLTRHKKSHTEEKPYKCEECGKGFKWPSTLTIHKIIHTGEKPYKCEECGKAFNQSSKLTKHKKIHTGEKPYTCEECGKAFNQSSNLTKHKRIHTGEKPYKCEECDKAFKWSSVLTKHKIIHTGEKLQI

SEQ ID NO: 16464 - protein, 659 aa, Homo Sapiens
MLHQPTPGNRGLTARMEVGPATETFVLELQCLEDGGPGPDTLSGGSGGSESQEEEEPQERNSSPQRPAVSAPVGASEIAEETRPGQRELQLQQLEQQPEPQQQPQHEQLQQPQPHLELQQQPQQDGQQQLSQLQQEKHQSVHHQELKPELQLMHQQQQLQPQQVQEQQRLQQQQEQLQTQQAQEQQVLQQQEQLQQQVQEQQLLQQQQEQLQQQQLLQQQEQLQQQQFQQQQEQLQQQQQLLLLQQQGQLQQQLLQQQQAQLQQQLLEQQQAQLQQQLLLQQQEQLQQQQQQQLLQQQQEQLQQQQLQPPPLEPEEEEEVELELMPVDLGSEQELEQQRQELERQQELERQQEQRQLQLKLQEELQQLEQQLEQQQQQLEQQEVQLELTPVELGAQQQEVQLELTPVQPELQLELVPAAGGGGAAVPGAPAAVVVAPPGYVVVQELMVLPAVAAPAVVAIPGPAGSAALTPARQRRRRRARDRPTICGECGKGFSRSTDLVRHQATHTGERPHRCGECGKGFSQHSNLVTHQRIHTGEKPYACSYCAKRFSESSALVQHQRTHTGERPYACGDCGKRFSVSSNLLRHRRTHSGERPYVCEDCGERFRHKVQIRRHERQLHGAGRSRGLGLLRASRPAALGGPARAEQAATATAPADKAL

SEQ ID NO: 16465 - protein, 632 aa, Homo Sapiens
MLREEAAQKRKEKEPGMALPQGHLTFRDVAIEFSLEEWKCLDPTQRALYRAMMLENYRNLHSVDISSKCMMKKFSSTAQGNTEVDTGTLERHESHHIGDFCFQKIGKDIHDFEFQWQEDKRNSHEATMTQIKKLTGSTDRYDRRHPGNKPIKDQLGLSFHSHLPELHIFQTKGKVGNQVEKSINDASSVLTSQRISSRPKIHISNNYENNFFHSSLLTLKQEVHIREKSFQCNESGKAFNCSSLLRKHQIIYLGGKQYKCDVCGKVFNQKRYLACHHRCHTGEKPYKCNECGKVFNQQSNLASHHRLHTGEKPYKCEECDKVFSRKSNLERHRRIHTGEKPYKCKVCEKAFRRDSHLTQHTRIHTGEKPYKCNECGKAFSGQSTLIHHQAIHGIGKLYKCNDCHKVFSNATTIANHWRIHNEERSYKCNKCGKFFRRRSYLVVHWRTHTGEKPYKCNECGKTFHHNSALVIHKAIHTGEKPYKCNECGKTFRHNSALVIHKAIHTGEKPYKCNECGKVFNQQATLARHHRLHTGEKPYKCEECDTVFSRKSHHETHKRIHTGEKPYKCDDFDEAFSQASSYAKQRRIHMGEKHHKCDDCGKAFTSHSHRIRHQRIHTGQKSYKCHKRGKVFS

SEQ ID NO: 16466 - protein, 203 aa, Homo Sapiens
MHTGEKPYTCEECVKLLTNPQALLYTGAFILNKNFTNVKNAAKPLLNPHPLINKRIHTGEKPYTCEECGKAFYRSSHLTEHKNIHTGEKSYKCEECGNAFYRSSHLTKHKRIHSGQKPYKCEECGKAFRQSSALNEHKKIHTAEKPYKCKECGKAFRWSRSLNEHTNIHIGEKPYTCEECGKDFTWSSTLTVHQRIQTGEKHS

SEQ ID NO: 16467 - protein, 531 aa, Homo Sapiens
MDSVAFEDVAVNFTQEEWALLDPSQKNLYREVMQETLRNLTSIGKKWNNQYIEDEHQNPRRNLRRLIGERLSESKESHQHGEVLTQVPDDTLKKKTPGVQSYESSVCGEIGIGLSSLNRHLRAFSYSSSLAIHGRTHTGEKPYECKECGKAFRFPSSVRRHERIHSAKKPYECKQCGKAFSFPSSVRRHERIHSAKKPYECKQCGKALSYLVSFQTHMRMHTGERPHKCNICGKAFFSPSSLKRHEKSHTGEKRYKCKQCDKAFNCPSSFQYHERTHSGEKPYECTQCRKAFRSVKYLRVHERKHTGEKPYECKLCGKGFISSTSFRYHEKTHTGEKPYECKKCVKAFSFVKDLRIHERTHTGEKPFECKQCGKTFTSSNSFHYHERTHTGEKPYECKQCGKAFRSASVLQKHIRTHTGEKPYGCKQCGKVFRVASQLKMHERTHTGEKPYECKQCGKAFISSNSIRYHKRTHTGEKPYKCKQCGKAFISSNSFLYHERIHTGEKPYECKQCGKAFRSASILQKHVRTHAG

SEQ ID NO: 16468 - protein, 563 aa, Homo Sapiens
MARRLLPAHVQESVTFRDVAVFFSQDEWLHLDSAQRALYREVMLENYSILVSLGILFSKPKVISQLEQGEDPWMVESGVPQGAHLGWESLFGTIVSKEENQEVMKKLIIDGTFDFKLEKTYINEDKLEKQQGKKNRLFSKVLVTIKKVYMKERSFKGVEFGKNLGLKSSLIRKPRIVSRGRRPRSQQYSVLFKQLGVNTVRKCYKCNICGKIFLHSSSLSKHQRIHTGEKLYKCKECRKAFSQSSSLTQHLRVHTGEKPYICSECGKAFSFTTSLIGHQRMHTGERPYKCKECGKTFKGSSSLNNHQRIHTGEKPYKCNECGRAFSQCSSLIQHHRIHTGEKPYECTQCGKAFTSISRLSRHHRIHTGEKPFHCNECGKVFSYHSALIIHQRIHTGEKPYACKECGKAFSQSSALIQHQRIHTGEKPYKCNECGKAFSWISRLNIHHRIHTGEKPYNCKECGKAFSSHSGVNTHRKIHTGEKPYKCNDCEKAFNQSSALIQHQRIHTGEKPYNCKVCGKAFRQSSSLMTHMRIHTGEKPYKCKECGKAFSQSSSLTNHQRTHN

SEQ ID NO: 16469 - protein, 577 aa, Homo Sapiens
MLRRGHLAFRDVAIEFPQEEWKCLDPAQRTLYREVMVENYRNLVFLGICLPDLSVISMLEQRRDPRNLQSEVKIANNPGGRECIKGVNAESSSKLGSNAGNKSLKNQLGLTFQLHLSELQLFQAERNISGCKHVEKPINNSLVSPLQKIYSSVKSHILNKYRNDFDDSPFLPQEQKAQIREKPCECNEHGKAFRVSSRLANNQVIHTADNPYKCNECDKVFSNSSNLVQHQRIHTGEKPYKCHECGKLFNRISLLARHQRIHTGEKPYKCHECGKVFTQNSHLANHHRIHTGEKPYKCNECGKVFNRNAHLARHQKIHSGEKPYKCKECGKAFSGGSGLTAHLVIHTGEKLYKCNKCGKVFNRNAHLTRHQRIHTGEKPYECKECGKVFRHKFCLTNHHRMHTGEQPYKCNECGKAFRDCSGLTAHLLIHTGEKPYKCKECAKVFRHRLSLSNHQRFHTGEKPYRCDECGKDFTRNSNLANHHRIHTGEKPYKCSECHKVFSHNSHLARHRQIHTGEKSYKCNECGKVFSHKLYLKKHERIHTGEKPYRCHECGKDFTRNSNLANHHRIHTGEKPYR

SEQ ID NO: 16470 - protein, 544 aa, Homo Sapiens
MAVMDLSSPWALTKQDSACFHLRNAEEERMIAVFLTTWLQEPMTFKDVAVEFTQEEWMMLDSAQRSLYRDVMLENYRNLTSVEYQLYRLTVISPLDQEEIRNMKKRIPQAICPDQKIQPKTKESTVQKILWEEPSNAVKMIKLTMHNWSSTLREDWECHKIRKQHKIPGGHWRQMIYAPKKTVPQELFRDYHELEENSKLGSKLIFSQSIFTSKHCQKCYSEIGCLKHNSIINNYVKNSISEKLYESHECDTTLWHFQRNQTVQKEYTYSKHGMHFTHNMFPVPNNLHMAQNACECNKDETLCHQSSLKKQGQTHTEKKHECNQCGKAFKRISNLTLYKKSHMGEKQYECKECGKVFNDSSTLRRHVRTHTGEKPYECNQCGKAFSQKTSLKAHMRTHTGEKPYECNQCGKSFGTSSYLIVHKRIHTGEKLYECSECGKAFNTSSHLKVHKKIHTGENVYECSDCGKVFSGVSSLRMHIRTHTGEKPYECKECRKAFSVSSSLRRHVRIHTGEKPYECIQCGKAFSQSSSLIIHKRIHTERETL

SEQ ID NO: 16471 - protein, 601 aa, Homo Sapiens
MGPLEFRDVAIEFSLEEWHCLDTAQQNLYRDVMLENYRHLVFLGIVVTKPDLITCLEQGKKPFTVKRHEMIAKSPVMCFHFAQDLCPEQSLKDSFQKVIVTRYEKREYGNLELKKGCESVDEGKVHKRGYNGLNQCLTATQSKVFQCDTYVKVSHIFSNSNRHKIRDTGKKPFKCIECGKAFNQSSTLATHKKIHTGEITCKCEECGKAFNRSSHLTSHKRIHTGEKRYKCEDCGKELKYSSTLTAHKRIHTGEKRYKCEDCGKELKYSSTLTAHKRIHTGEKPYKCDKCGRAFISSSILYVHKISHTEEKPYKCEECGKAFKLSSILSTHKRIHTGEKPYKCEECGKAFRRSLVLRTHKRIHTGEKPYKCDKCGKAFISSSLLYKHKISHSEKKPYKCEECGKAFKRSSTLTIHKISHTEEKPYKCQECDKVFKRSSALSTHKIIHSGEKPYKCEECGKAFKRSSNLTTHKISHTEEKLYKCQECDKAFKYSSALSTHKIIHSGENPYKCEECGKAFKRSSVLSKHKIIHTGAKPYKCEECGKAFKRSSQLTSHKISHTGEKPYKCEECGKAFNLSSDLNTHKRIHIGQKAYIVKNMANL

SEQ ID NO: 16472 - protein, 1191 aa, Homo Sapiens
MPGTPGSLEMGLLTFRDVAIEFSPEEWQCLDTAQQNLYRNVMLENYRNLAFLGIALSKPDLITYLEQGKEPWNMKQHEMVDEPTGICPHFPQDFWPEQSMEDSFQKVLLRKYEKCGHENLQLRKGCKSVDECKVHKEGYNKLNQCLTTAQSKVFQCGKYLKVFYKFLNSNRHTIRHTGKKCFKCKKCVKSFCIRLHKTQHKCVYITEKSCKCKECEKTFHWSSTLTNHKEIHTEDKPYKCEECGKAFKQLSTLTTHKIICAKEKIYKCEECGKAFLWSSTLTRHKRIHTGEKPYKCEECGKAFSHSSTLAKHKRIHTGEKPYKCEECGKAFSRSSTLAKHKRIHTGEKPYKCKECGKAFSNSSTLANHKITHTEEKPYKCKECDKAFKRLSTLTKHKIIHAGEKLYKCEECGKAFNRSSNLTIHKFIHTGEKPYKCEECGKAFNWSSSLTKHKRFHTREKPFKCKECGKAFIWSSTLTRHKRIHTGEKPYKCEECGKAFRQSSTLTKHKIIHTGEKPYKFEECGKAFRQSLTLNKHKIIHSREKPYKCKECGKAFKQFSTLTTHKIIHAGKKLYKCEECGKAFNHSSSLSTHKIIHTGEKSYKCEECGKAFLWSSTLRRHKRIHTGEKPYKCEECGKAFSHSSALAKHKRIHTGEKPYKCKECGKAFSNSSTLANHKITHTEEKPYKCKECDKTFKRLSTLTKHKIIHAGEKLYKCEECGKAFNRSSNLTIHKFIHTGEKPYKCEECGKAFNWSSSLTKHKRIHTREKPFKCKECGKAFIWSSTLTRHKRIHTGEKPYKCEECGKAFSRSSTLTKHKTIHTGEKPYKCKECGKAFKHSSALAKHKIIHAGEKLYKCEECGKAFNQSSNLTTHKIIHTKEKPSKSEECDKAFIWSSTLTEHKRIHTREKTYKCEECGKAFSQPSHLTTHKRMHTGEKPYKCEECGKAFSQSSTLTTHKIIHTGEKPYKCEECGKAFRKSSTLTEHKIIHTGEKPYKCEECGKAFSQSSTLTRHTRMHTGEKPYKCEECGKAFNRSSKLTTHKIIHTGEKPYKCEECGKAFISSSTLNGHKRIHTREKPYKCEECGKAFSQSSTLTRHKRLHTGEKPYKCGECGKAFKESSALTKHKIIHTGEKPYKCEKCGKAFNQSSILTNHKKIHTITPVIPLLWEAEAGGSRGQEMETILANTVKPLLY

SEQ ID NO: 16473 - protein, 586 aa, Homo Sapiens
MGPLTFRDVKIEFSLEEWQCLDTAQRNLYRDVMLENYRNLVFLGIAVSKPDLITWLEQGKEPWNLKRHEMVDKTPVMCSHFAQDVWPEHSIKDSFQKVILRTYGKYGHENLQLRKDHKSVDACKVYKGGYNGLNQCLTTTDSKIFQCDKYVKVFHKFPNVNRNKIRHTGKKPFKCKNRGKSFCMLSQLTQHKKIHTREYSYKCEECGKAFNWSSTLTKHKIIHTGEKPYKCEECGKAFNRSSNLTKHKIIHTGEKPYKCEECGKAFNRSSTLTKHKRIHTEEKPYKCEECGKAFNQFSILNKHKRIHMEDKPYKCEECGKAFRVFSILKKHKIIHTGEKPYKCEECGKAFNQFSNLTKHKIIHTGEKPYKCDECGKAFNQSSTLTKHKRIHTGEKPYKCEECGKAFKQSSTLTEHKIIHTGEKPYKCEKCGKAFSWSSAFTKHKRNHMEDKPYKCEECGKAFSVFSTLTKHKIIHTREKPYKCEECGKAFNQSSIFTKHKIIHTEGKSYKCEKCGNAFNQSSNLTARKIIYTGEKPYKYEECDKAFNKFSTLITHQIIYTGEKPCKHECGRAFNKSSNYTKEKLQT

SEQ ID NO: 16474 - protein, 620 aa, Homo Sapiens
MGPLQFRDVAIEFSLEEWHCLDTAQRNLYRNVMLENYSNLVFLGIVVSKPDLIAHLEQGKKPLTMKRHEMVANPSVICSHFAQDLWPEQNIKDSFQKVILRRYEKRGHGNLQLIKRCESVDECKVHTGGYNGLNQCSTTTQSKVFQCDKYGKVFHKFSNSNRHNIRHTEKKPFKCIECGKAFNQFSTLITHKKIHTGEKPYICEECGKAFKYSSALNTHKRIHTGEKPYKCDKCDKAFIASSTLSKHEIIHTGKKPYKCEECGKAFNQSSTLTKHKKIHTGEKPYKCEECGKAFNQSSTLTKHKKIHTGEKPYVCEECGKAFKYSRILTTHKRIHTGEKPYKCNKCGKAFIASSTLSRHEFIHMGKKHYKCEECGKAFIWSSVLTRHKRVHTGEKPYKCEECGKAFKYSSTLSSHKRSHTGEKPYKCEECGKAFVASSTLSKHEIIHTGKKPYKCEECGKAFNQSSSLTKHKKIHTGEKPYKCEECGKAFNQSSSLTKHKKIHTGEKPYKCEECGKAFNQSSTLIKHKKIHTREKPYKCEECGKAFHLSTHLTTHKILHTGEKPYRCRECGKAFNHSATLSSHKKIHSGEKPYECDKCGKAFISPSSLSRHEIIHTGEKP

SEQ ID NO: 16475 - protein, 572 aa, Homo Sapiens; identical to SEQ ID NO: 14458

SEQ ID NO: 16476 - protein, 864 aa, Homo Sapiens
MGSLTFWDVTIEFALEEWQCLDMAQQNLYRNVMLENYRNLVFLGIAVSKLDLITCLKQGKEPWNMKRHEMVTKPPVISSHFTQDFWPDQSIKDSFQEIILRTYARCGHKNLRLRKDCESVNEGKMHEEAYNKLNQCWTTTQGKIFQCNKYVKVFHKYSNSNRYKIRHTKKKTFKCMKCSKSFFMLSHLIQHKRIHTRENIYKCEERGKAFKWFSTLIKHKIIHTEDKPYKYKKCGKAFNISSMFTKCKIIHTGKKPCKCEECGKVFNNSSTLMKHKIIHTGKKPYKCEECGKAFKQSSHLTRHKAIHTGEKPYKCEECGKAFNHFSALRKHQIIHTGKKPYKCEECGKAFSQSSTLRKHEIIHTEEKPYKYEECGKAFSNLSALRKHEIIHTGQKPYKCEECGKAFKWSSKLTVHKVIHTAEKPCKCEECGKAFKRFSALRKHKIIHTGKQPYKCEECSKAFSNFSALRKHEIIHTGEKPYKCEECGKAFKWSSKLTVHKVIHMEEKPCKCEECGKAFKHFSALRKHKIIHTGKKPYKCEECGKAFNNSSTLMKHKIIHTGKKPYKCEECGKAFKQSSHLTRHKAIHTGEKPYKCEECGKAFNHFSALRKHQIIHTGKKPYKCEECGKAFSQSSTLRKHEIIHTGEKPYKCEECGKAFKWSSHLTRHKVIHTEEKPYKCEECGKAFNHFSALRKHKIIHTGKKPYKCEECGKAFSQSSTLRKHEIIHTGEKPYKCEECGKAFKWSSKLTVHKVIHTAEKPCKCEECGKAFKHFSALRKHKIIHTGKKPYKCEECGKAFNNSSTLRKHEIIHTGEKSYKCEECGKAFQWSSKLTLHKVIHMERNPANVKNVAKLLNISQPLENMR

SEQ ID NO: 16477 - protein, 1918 aa, Homo Sapiens
MEERRPHLDARPRNSHTNHRGPVDGELPPRARNQANNPPANALRGGASHPGRHPRANNHPAAYWQREERFRAMGRNPHQGRRNQEGHASDEARDQRHDQENDTRWRNGNQDCRNRRPPWSNDNFQQWRTPHQKPTEQPQQAKKLGYKFLESLLQKDPSEVVITLATSLGLKELLSHSSMKSNFLELICQVLRKACSSKMDRQSVLHVLGILKNSKFLKVCLPAYVVGMITEPIPDIRNQYPEHISNIISLLQDLVSVFPASSVQETSMLVSLLPTSLNALRASGVDIEEETEKNLEKVQTIIEHLQEKRREGTLRVDTYTLVQPEAEDHVESYRTMPIYPTYNEVHLDERPFLRPNIISGKYDSTAIYLDTHFRLLREDFVRPLREGILELLQSFEDQGLRKRKFDDIRIYFDTRIITPMCSSSGIVYKVQFDTKPLKFVRWQNSKRLLYGSLVCMSKDNFETFLFATVSNREQEDLCRGIVQLCFNEQSQQLLAEVQPSDSFLMVETTAYFEAYRHVLEGLQEVQEEDVPFQRNIVECNSHVKEPRYLLMGGRYDFTPLIENPSATGEFLRNVEGLRHPRINVLDPGQWPSKEALKLDDSQMEALQFALTRELAIIQGPPGTGKTYVGLKIVQALLTNESVWQISLQKFPILVVCYTNHALDQFLEGIYNCQKTSIVRVGGRSNSEILKQFTLRELRNKREFRRNLPMHLRRAYMSIMTQMKESEQELHEGAKTLECTMRGVLREQYLQKYISPQHWESLMNGPVQDSEWICFQHWKHSMMLEWLGLGVGSFTQSVSPAGPENTAQAEGDEEEEGEEESSLIEIAEEADLIQADRVIEEEEVVRPQRRKKEESGADQELAKMLLAMRLDHCGTGTAAGQEQATGEWQTQRNQKKKMKKRVKDELRKLNTMTAAEANEIEDVWQLDLSSRWQLYRLWLQLYQADTRRKILSYERQYRTSAERMAELRLQEDLHILKDAQVVGMTTTGAAKYRQILQKVEPRIVIVEEAAEVLEAHTIATLSKACQHLILIGDHQQLRPSANVYDLAKNFNLEVSLFERLVKVNIPFVRLNYQHRMCPEIARLLTPHIYQDLENHPSVLKYEKIKGVSSNLFFVEHNFPEQEIQEGKSHQNQHEAHFVVELCKYFLCQEYLPSQITILTTYTGQLFCLRKLMPAKTFAGVRVHVVDKYQGEENDIILLSLVRSNQEGKVGFLQISNRICVALSRAKKGMYCIGNMQMLAKVPLWSKIIHTLRENNQIGPMLRLCCQNHPETHTLVSKASDFQKVPEGGCSLPCEFRLGCGHVCTRACHPYDSSHKEFQCMKPCQKVICQEGHRCPLVCFQECQPCQVKVPKTIPRCGHEQMVPCSVPESDFCCQEPCSKSLRCGHRCSHPCGEDCVQLCSEMVTIKLKCGHSQPVKCGHVEGLLYGGLLVKCTTKCGTILDCGHPCPGSCHSCFEGRFHERCQQPCKRLLICSHKCQEPCIGECPPCQRTCQNRCVHSQCKKKCGELCSPCVEPCVWRCQHYQCTKLCSEPCNRPPCYVPCTKLLVCGHPCIGLCGEPCPKKCRICHMDEVTQIFFGFEDEPDARFVQLEDCSHIFEVQALDRYMNEQKDDEVAIRLKVCPICQVPIRKNLRYGTSIKQRLEEIEIIKEKIQGSAGEIATSQERLKALLERKSLLHQLLPEDFLMLKEKLAQKNLSVKDLGLVENYISFYDHLASLWDSLKKMHVLEEKRVRTRLEQVHEWLAKKRLSFTSQELSDLRSEIQRLTYLVNLLTRYKIAEKKVKDSIAVEVYSVQNILEKTCKFTQEDEQLVQEKMEALKATLPCSGLGISEEERVQIVSAIGYPRGHWFKCRNGHIYVIGDCGGAMERGTCPDCKEVIGGTNHTLERSNQLASEMDGAQHAAWSDTANNLMNFEEIQGMM

SEQ ID NO: 16478 - protein, 408 aa, Homo Sapiens
MLPRPKAPASPRRPQTPTPSEQDADPGPASPRDTEAQRLRFRQFQYHVASGPHLALGQLWTLCRQWLRPEARSKEQMLELLVLEQFLGALPSKMRTWVQSQGPRSCREAASLVEDLTQMCQQEVLVSLDSVEPQDWSFGEEEDGKSPRSQKEPSQASELILDAVAAAPALPEESEWLETTQLQQSLHTRAEAEAPRAPGLLGSRARLPLKPSIWDEPEDLLAGPSSDLRAEGTVISSPKGPSAQRISPRRRNRNTDQSGRHQPSLKHTKGGTQEAVAGISVVPRGPRGGRPFQCADCGMVFTWVTHFIEHQKTHREEGPFPCPECGKVFLHNSVLTEHGKIHLLEPPRKKAPRSKGPRESVPPRDGAQGPVAPRSPKRPFQCSVCGKAFPWMVHLIDHQKLHTAHGHM

SEQ ID NO: 16479 - protein, 725 aa, Homo Sapiens
MGPRASLSRLRELCGHWLRPALHTKKQILELLVLEQFLSVLPPHLLGRLQGQPLRDGEEVVLLLEGIHREPSHAGPLDFSCNAGKSCPRADVTLEEKGCASQVPSHSPKKELPAEEPSVLGPSDEPPRPQPRAAQPAEPGQWRLPPSSKQPLSPGPQKTFQALQESSPQGPSPWPEESSRDQELAAVLECLTFEDVPENKAWPAHPLGFGSRTPDKEEFKQEEPKGAAWPTPILAESQADSPGVPGEPCAQSLGRGAAASGPGEDGSLLGSSEILEVKVAEGVPEPNPELQFICADCGVSFPQLSRLKAHQLRSHPAGRSFLCLCCGKSFGRSSILKLHMRTHTDERPHACHLCGHRFRQSSHLSKHLLTHSSEPAFLCAECGRGFQRRASLVQHLLAHAQDQKPPCAPESKAEAPPLTDVLCSHCGQSFQRRSSLKRHLRIHARDKDRRSSEGSGSRRRDSDRRPFVCSDCGKAFRRSEHLVAHRRVHTGERPFSCQACGRSFTQSSQLVSHQRVHTGEKPYACPQCGKRFVRRASLARHLLTHGGPRPHHCTQCGKSFGQTQDLARHQRSHTGEKPCRCSECGEGFSQSAHLARHQRIHTGEKPHACDTCGHRFRNSSNLARHRRSHTGERPYSCQTCGRSFRRNAHLRRHLATHAEPGQEQAEPPQECVECGKSFSRSCNLLRHLLVHTGARPYSCTQCGRSFSRNSHLLRHLRTHARETLY

SEQ ID NO: 16480 - protein, 604 aa, Homo Sapiens
MASTWAIQAHMDQDEPLEVKIEEEKYTTRQDWDLRKNNTHSREVFRQYFRQFCYQETSGPREALSRLRELCHQWLRPETHTKEQILELLVLEQFLTILPEELQAWVQEQHPESGEEVVTVLEDLERELDEPGEQVSVHTGEQEMFLQETVRLRKEGEPSMSLQSMKAQPKYESPELESQQEQVLDVETGNEYGNLKQEVSEEMEPHGKTSSKFENDMSKSARCGETREPEEITEEPSACSREDKQPTCDENGVSLTENSDHTEHQRICPGEESYGCDDCGKAFSQHSHLIEHQRIHTGDRPYKCEECGKAFRGRTVLIRHKIIHTGEKPYKCNECGKAFGRWSALNQHQRLHTGEKHYHCNDCGKAFSQKAGLFHHIKIHTRDKPYQCTQCNKSFSRRSILTQHQGVHTGAKPYECNECGKAFVYNSSLVSHQEIHHKEKCYQCKECGKSFSQSGLIQHQRIHTGEKPYKCDVCEKAFIQRTSLTEHQRIHTGERPYKCDKCGKAFTQRSVLTEHQRIHTGERPYKCDECGNAFRGITSLIQHQRIHTGEKPYQCDECGKAFRQRKKTSYKEILLKNHSEPQAGVNLLLSSLIPEWQSCFRRDL

SEQ ID NO: 16481 - protein, 348 aa, Homo Sapiens
MTTALEPEDQKGLLIIKAEDHYWGQDSSSQKCSPHRRELYRQHFRKLCYQDAPGPREALTQLWELCRQWLRPECHTKEQILDLLVLEQFLSILPKDLQAWVRAHHPETGEEAVTVLEDLERELDEPGKQVPGNSERRDILMDKLAPLGRPYESLTVQLHPKKTQLEQEAGKPQRNGDKTRTKNEELFQKEDMPKDKEFLGEINDRLNKDTPQHPKSKDIIENEGRSEWQQRERRRYKCDECGKSFSHSSDLSKHRRTHTGEKPYKCDECGKAFIQRSHLIGHHRVHTGVKPYKCKECGKDFSGRTGLIQHQRIHTGEKPYECDECGRPFRVSSALIRHQRIHTANKLY

SEQ ID NO: 16482 - protein, 510 aa, Homo Sapiens
MLPLEKAFASPRSSPAPPDLPTPGSAAGVQQEEPETIPERTPADLEFSRLRFREFVYQEAAGPHQTLARLHELCRQWLMPEARSKEQMLELLVLEQFLGILPDKVRPWVVAQYPESCKKAASLVEGLADVLEEPGMLLGSPAGSSSILSDGVYERHMDPLLLPGELASPSQALGAGEIPAPSETPWLSPDPLFLEQRRVREAKTEEDGPANTEQKLKSFPEDPQHLGEWGHLDPAEENLKSYRKLLLWGYQLSQPDAASRLDTEELRLVERDPQGSSLPEGGRRQESAGCACEEAAPAGVLPELPTEAPPGDALADPPSGTTEEEEEQPGKAPDPQDPQDAESDSATGSQRQSVIQQPAPDRGTAKLGTKRPHPEDGDGQSLEGVSSSGDSAGLEAGQGPGADEPGLSRGKPYACGECGEAFAWLSHLMEHHSSHGGRKRYACQGCWKTFHFSLALAEHQKTHEKEKSYALGGARGPQPSTREAQAGARAGGPPESVEGEAPPAPPEAQR

SEQ ID NO: 16483 - protein, 614 aa, Homo Sapiens
MMAADIPRVTTPLSSLVQVPQEEDRQEEEVTTMILEDDSWVQEAVLQEDGPESEPFPQSAGKGGPQEEVTRGPQGALGRLRELCRRWLRPEVHTKEQMLTMLPKEIQAWLQEHRPESSEEAAALVEDLTQTLQDSDFEIQSENGENCNQDMFENESRKIFSEMPEGESAQHSDGESDFERDAGIQRLQGHSPGEDHGEVVSQDREVGQLIGLQGTYLGEKPYECPQCGKTFSRKSHLITHERTHTGEKYYKCDECGKSFSDGSNFSRHQTTHTGEKPYKCRDCGKSFSRSANLITHQRIHTGEKPFQCAECGKSFSRSPNLIAHQRTHTGEKPYSCPECGKSFGNRSSLNTHQGIHTGEKPYECKECGESFSYNSNLIRHQRIHTGEKPYKCTDCGQRFSQSSALITHRRTHTGEKPYQCSECGKSFSRSSNLATHRRTHMVEKPYKCGVCGKSFSQSSSLIAHQGMHTGEKPYECLTCGESFSWSSNLLKHQRIHTGEKPYKCSECGKCFSQRSQLVVHQRTHTGEKPYKCLMCGKSFSRGSILVMHQRAHLGDKPYRCPECGKGFSWNSVLIIHQRIHTGEKPYKCPECGKGFSNSSNFITHQRTHMKEKLY

SEQ ID NO: 16484 - protein, 1043 aa, Homo Sapiens
MAMALELQAQASPQPEPEELLIVKLEEDSWGSESKLWEKDRGSVSGPEASRQRFRQFQYRDAAGPHEAFSQLWALCCRWLRPEIRLKEQILELLVLEQFLTILPREVQTWVQARHPESGEEAVALVEDWHRETRTAGQSGLELHTEETRPLKTGEEAQSFQLQPVDPWPEGQSQKKGVKNTCPDLPNHLNAEVAPQPLKESAVLTPRVPTLPKMGSVGDWEVTAESQEALGPGKHAEKELCKDPPGDDCGNSVCLGVPVSKPSNTSEKEQGPEFWGLSLINSGKRSTADYSLDNEPAQALTWRDSRAWEEQYQWDVEDMKVSGVHWGYEETKTFLAILSESPFSEKLRTCHQNRQVYRAIAEQLRARGFLRTLEQCRYRVKNLLRNYRKAKSSHPPGTCPFYEELEALVRARTAIRATDGPGEAVALPRLGYSDAEMDEQEEGGWDPEEMAEDCNGAGLVNVESTQGPRIAGAPALFQSRIAGVHWGYEETKAFLAILSESPFSEKLRTCHQNSQVYRAIAERLCALGFLRTLEQCRYRFKNLLRSYRKAKSSHPPGTCPFYEELDSLMRARAAVRAMGTVREAAGLPRCGQSSAETDAQEAWGEVANEDAVKPSTLCPKAPDMGFEMRHEDEDQISEQDIFEGLPGALSKCPTEAVCQPLDWGEDSENENEDEGQWGNPSQEQWQESSSEEDLEKLIDHQGLYLAEKPYKCDTCMKSFSRSSHFIAHQRIHTGEKPYKCLECGKNFSDRSNLNTHQRIHTGEKPYKCLECGKSFSDHSNLITHQRIHTGEKPYKCGECWKSFNQSSNLLKHQRIHLGGNPDQCSEPGGNFAQSPSFSAHWRNSTEETAPEQPQSISKDLNSPGPHSTNSGEKLYECSECGRSFSKSSALISHQRIHTGEKPYECAECGKSFSKSSTLANHQRTHTGEKPYKCVDCGKCFSERSKLITHQRVHTGEKPYKCLECGKFFRDRSNLITHQRIHTGEKPYKCRECGKCFNQSSSLIIHQRIHTGEKPYKCTECGKDFNNSSHFSAHRRTHAGGKAS

SEQ ID NO: 16485 - protein, 473 aa, Homo Sapiens
MMTKVLGMAPVLGPRPPQEQVGPLMVKVEEKEEKGKYLPSLEMFRQRFRQFGYHDTPGPREALSQLRVLCCEWLRPEIHTKEQILELLVLEQFLTILPQELQAWVQEHCPESAEEAVTLLEDLERELDEPGHQVSTPPNEQKPVWEKISSSGTAKESPSSMQPQPLETSHKYESWGPLYIQESGEEQEFAQDPRKVRDCRLSTQHEESADEQKGSEAEGLKGDIISVIIANKPEASLERQCVNLENEKGTKPPLQEAGSKKGRESVPTKPTPGERRYICAECGKAFSNSSNLTKHRRTHTGEKPYVCTKCGKAFSHSSNLTLHYRTHLVDRPYDCKCGKAFGQSSDLLKHQRMHTEEAPYQCKDCGKAFSGKGSLIRHYRIHTGEKPYQCNECGKSFSQHAGLSSHQRLHTGEKPYKCKECGKAFNHSSNFNKHHRIHTGEKPYWCHHCGKTFCSKSNLSKHQRVHTGEGEAP

SEQ ID NO: 16486 - protein, 491 aa, Homo Sapiens
MAIPKHSLSPVPWEEDSFLQVKVEEEEEASLSQGGESSHDHIAHSEAARLRFRHFRYEEASGPHEALAHLRALCCQWLQPEAHSKEQILELLVLEQFLGALPPEIQAWVGAQSPKSGEEAAVLVEDLTQVLDKRGWDPGAEPTEASCKQSDLGESEPSNVTETLMGGVSLGPAFVKACEPEGSSERSGLSGEIWTKSVTQQIHFKKTSGPYKDVPTDQRGRESGASRNSSSAWPNLTSQEKPPSEDKFDLVDAYGTEPPYTYSGKRSSKCRECRKMFQSASALEAHQKTHSRKTPYACSECGKAFSRSTHLAQHQVVHTGAKPHECKECGKAFSRVTHLTQHQRIHTGEKPYKCGECGKTFSRSTHLTQHQRVHTGERPYECDACGKAFSQSTHLTQHQRIHTGEKPYKCDACGRAFSDCSALIRHLRIHSGEKPYQCKVCPKAFAQSSSLIEHQRIHTGEKPYKCSDCGKAFSRSSALMVHLRIHITVLQ

SEQ ID NO: 16487 - protein, 389 aa, Homo Sapiens
MAITLTLQTAEMQEGLLAVKVKEEEEEHSCGPESGLSRNNPHTREIFRRRFRQFCYQESPGPREALQRLQELCHQWLRPEMHTKEQILELLVLEQFLTILPEELQAWVRQHRPVSGEEAVTVLEDLERELDDPGEQVLSHAHEQEEFVKEKATPGAAQESSNDQFQTLEEQLGYNLREVCPVQEIDGKAGTWNVELAPKREISQEVKSLIQVLGKQNGNITQIPEYGDTCDREGRLEKQRVSSSVERPYICSECGKSFTQNSILIEHQRTHTGEKPYECDECGRAFSQRSGLFQHQRLHTGEKRYQCSVCGKAFSQNAGLFHHLRIHTGEKPYQCNQCNKSFSRRSVLIKHQRIHTGERPYECEECGKNFIYHCNLIQHRKVHPVAESS

SEQ ID NO: 16488 - protein, 544 aa, Homo Sapiens
MLKEHPEMAEAPQQQLGIPVVKLEKELPWGRGREDPSPETFRLRFRQFRYQEAAGPQEALRELQELCRRWLRPELHTKEQILELLVLEQFLTILPREFYAWIREHGPESGKALAAMVEDLTERALEAKAVPCHRQGEQEETALCRGAWEPGIQLGPVEVKPEWGMPPGEGVQGPDPGTEEQLSQDPGDETRAFQEQALPVLQAGPGLPAVNPRDQEMAAGFFTAGSQGLGPFKDMALAFPEEEWRHVTPAQIDCFGEYVEPQDCRVSPGGGSKEKEAKPPQEDLKGALVALTSERFGEASLQGPGLGRVCEQEPGGPAGSAPGLPPPQHGAIPLPDEVKTHSSFWKPFQCPECGKGFSRSSNLVRHQRTHEEKSYGCVECGKGFTLREYLMKHQRTHLGKRPYVCSECWKTFSQRHHLEVHQRSHTGEKPYKCGDCWKSFSRRQHLQVHRRTHTGEKPYTCECGKSFSRNANLAVHRRAHTGEKPYGCQVCGKRFSKGERLVRHQRIHTGEKPYHCPACGRSFNQRSILNRHQKTQHRQEPLVQ

SEQ ID NO: 16489 - protein, 478 aa, Homo Sapiens
MATALVSAHSLAPLNLKKEGLRVVREDHYSTWEQGFKLQGNSKGLGQEPLCKQFRQLRYEETTGPREALSRLRELCQQWLQPETHTKEQILELLVLEQFLIILPKELQARVQEHHPESREDVVVVLEDLQLDLGETGQQDPDQPKKQKILVEEMAPLKGVQEQQVRHECEVTKPEKEKGEETRIENGKLIVVTDSCGRVESSGKISEPMEAHNEGSNLERHQAKPKEKIEYKCSEREQRFIQHLDLIEHASTHTGKKLCESDVCQSSSLTGHKKVLSREKGHQCHECGKAFQRSSHLVRHQKIHLGEKPYQCNECGKVFSQNAGLLEHLRIHTGEKPYLCIHCGKNFRRSSHLNRHQRIHSQEEPCECKECGKTFSQALLLTHHQRIHSHSKSHQCNECGKAFSLTSDLIRHHRIHTGEKPFKCNICQKAFRLNSHLAQHVRIHNEEKPYQCSECGEAFRQRSGLFQHQRYHHKDKLA

SEQ ID NO: 16490 - protein, 852 aa, Homo Sapiens; identical to SEQ ID NO: 14472

SEQ ID NO: 16491 - protein, 494 aa, Homo Sapiens
MSGEATVLAYHAPEEQEGLLVVKVEEENYVLDQDFGLQENPWSQEVFRQKFRQFSYSDSTGPREALSRLRELCCQWLRPEVHSKEQILELLMLEQFLAILPEELQAWLREHRPENGEEAVTMLEELEKELEEPRQQDTTHGQEMFWQEMTSTGALKSLSLNSPVQPLENQCKTETQESQAFQERDGRMVAGKVLMAKQEIVECVASAAMISPGKLPGETHSQRIAEEALGGLDNSKKQKGNAAGNKISQLPSQDRHFSLATFNRRIPTEHSVLESHESEGSFSMNSNDITQQSVDTREKLYECFDCGKAFCQSSKLIRHQRIHTGERPYACKECGKAFSLSSDLVRHQRIHSGEKPYECCECGKAFRGSSELIRHRRIHTGEKPYECGECGKAFSRSSALIQHKKIHTGDKSYECIACGKAFGRSSILIEHQRIHTGEKPYECNECGKSFNQSSALTQHQRIHTGEKPYECSECRKTFRHRSGLMQHQRTHTRV

SEQ ID NO: 16492 - protein, 406 aa, Homo Sapiens
MASTEEQYDLKIVKVEEDPIWDQETHLRGNNFSGQEASRQLFRQFCYQETPGPREALSRLRELCHQWLRPEIHTKEQILELLVLEQFLTILPEELQAWVREHHPESGEEAVAVVEDLEQELSEPGNQAPDHEHGHSEVLLEDVEHLKVKQEPTDIQLQPMVTQLRYESFCLHQFQEQDGESIPENQELASKQEILKEMEHLGDSKLQRDVSLDSKYRETCKRDSKAEKQQAHSTGERRHRCNECGKSFTKSSVLIEHQRIHTGEKPYECEECGKAFSRRSSLNEHRRSHTGEKPYQCKECGKAFSASNGLTRHRRIHTGEKPYECKVCGKAFLLSSCLVQHQRIHTGEKRYQCRECGKAFIQNAGLFQHLRVHTGEKPYQCSQCSKLFSKRTLLKKHQKIHTGERP

SEQ ID NO: 16493 - protein, 697 aa, Homo Sapiens
MMAAVKSTEAHPSSNKDPTQGQKSALQGNSPDSEASRQRFRQFCYQEVTGPHEAFSKLWELCCQWLRPKTHSKEEILELLVLEQFLTILPEEIQTWVREQHPENGEEAVALVEDVQRAPGQQVLDSEKDLKVLMKEMAPLGATRESLRSQWKQEVQPEEPTFKGSQSSHQRPGEQSEAWLAPQAPRNLPQNTGLHDQETGAVVWTAGSQGPAMRDNRAVSLCQQEWMCPGPAQRALYRGATQRKDSHVSLATGVPWGYEETKTLLAILSSSQFYGKLQTCQQNSQIYRAMAEGLWEQGFLRTPEQCRTKFKSLQLSYRKVRRGRVPEPCIFYEEMNALSGSWASAPPMASDAVPGQEGSDIEAGELNHQNGEPTEVEDGTVDGADRDEKDFRNPGQEVRKLDLPVLFPNRLGFEFKNEIKKENLKWDDSEEVEINKALQRKSRGVYWHSELQKGLESEPTSRRQCRNSPGESEEKTPSQEKMSHQSFCARDKACTHILCGKNCSQSVHSPHKPALKLEKVSQCPECGKTFSRSSYLVRHQRIHTGEKPHKCSECGKGFSERSNLTAHLRTHTGERPYQCGQCGKSFNQSSSLIVHQRTHTGEKPYQCIVCGKRFNNSSQFSAHRRIHTGESPYKCAVCGKIFNNSSHFSAHRKTHTGEKPYRCSHCERGFTKNSALTRHQTVHMKAVLSSQEGRDAL

SEQ ID NO: 16494 - protein, 433 aa, Homo Sapiens
MALDLRTIFQCEPSENNLGSENSAFQQSQGPAVQREEGISEFSRMVLNSFQDSNNSYARQELQRLYRIFHSWLQPEKHSKDEIISLLVLEQFMIGGHCNDKASVKEKWKSSGKNLERFIEDLTDDSINPPALVHVHMQGQEALFSEDMPLRDVIVHLTKQVNAQTTREANMGTPSQTSQDTSLETGQGYEDEQDGWNSSSKTTRVNENITNQGNQIVSLIIIQEENGPRPEEGGVSSDNPYNSKRAELVTARSQEGSINGITFQGVPMVMGAGCISQPEQSSPESALTHQSNEGNSTCEVHQKGSHGVQKSYKCEECPKVFKYLCHLLAHQRRHRNERPFVCPECQKGFFQISDLRVHQIIHTGKKPFTCSMCKKSFSHKTNLRSHERIHTGEKPYTCPFCKTSYRQSSTYHRHMRTHEKITLPSVPSTPEAS

SEQ ID NO: 16495 - protein, 496 aa, Homo Sapiens
MAANCTSSWSLGESCNRPGLELPRSMASSETQLGNHDVDPEISHVNFRMFSCPKESDPIQALRKLTELCHLWLRPDLHTKEQILDMLVMEQFMISMPQELQVLVMMNGVQSCKDLEDLLRNNRRPKKWSVVTFHGKEYIVQDSDIEMAEAPSSVRDDLKDVSSQRASSVNQMRPGEGQAHRELQILPRVPALSRRQGEDFLLHKSIDVTGDPKSLRPKQTLEKDLKENREENPGLTSPEPQLPKSPTDLVRAKEGKDPPKIASVENVDADTPSACVVEREASTHSGNRGDALNLSSPKRSKPDASSISQEEPQGEATPVGNRESPGQAGMNSIHSPGPASPVSHPDGQEAKALPPFACDVCEKRFTCNSKLVIHKRSHTGERLFQCNLCGKRFMQLISLQFHQRTHTGERPYTCDVCQKQFTQKSYLKCHKRSHTGEKPFECKDCKKVFTYRGSLKEHQRIHSGEKPYKCSKCPRAFSRLKLLRRHQKTHPEATSQ

SEQ ID NO: 16496 - protein, 495 aa, Homo Sapiens
MAANWTLSWGQGGPCNSPGSDTPRSVASPETQLGNHDRNPETWHMNFRMFSCPEESDPIQALRKLTELCHLWLRPDLHTKEQILDMLVMEQFMISMPQELQVLVKVNGVQSCKDLEDLLRNNRRPKKWSIVNLLGKEYLMLNSDVEMAEAPASVRDDPRDVSSQWASSVNQMHPGTGQARREQQILPRVAALSRRQGEDFLLHKSIDVTGDPNSPRPKQTLEKDLKENREENPGLSSPEPQLPKSPNLVRAKEGKEPQKRASVENVDADTPSACVVEREALTHSGNRGDALNLSSPKRSKPDASSISQEEPQGEATPVGNRESPGQAEINPVHSPGPAGPVSHPDGQEAKALPPFACDVCNKSFKYFSQLSIHRRSHTGDRPFQCDLCRKRFLQPSDLRVHQRVHTGERPYMCDVCQKRFAHESTLQGHKRIHTGERPFKCKYCSKVFSHKGNLNVHQRTHSGEKPYKCPTCQKAFRQLGTFKRHLKTHRETTSQ

SEQ ID NO: 16497 - protein, 496 aa, Homo Sapiens
MAANCTSSWSLGESCNSPGSEPPQSMPSPATQLGNHDSDPETCHVNFRMFSCPKESDPIQALRKLTELCHLWLRPDLHTKEQILDMLVMEQFMISMPQELQVLVMMNGVQSCKDLEDLLRNNRRPKKWSVVSFLGKEYLMQESDVEMAEAPASVRDDPRHVSSQRTSSVNQMCPEEGQASQELQTLPRVPALFRRQEEDFLLPETTVMKGDPKALRPKPTLEKDLEEDREENPGLTSPEPQLPNSPTGVVGAKEGKEPQKRASVENVDADTPSACVVEREASTHSGSRGDALNLRGLKRSKPDATSISQEEPQGEATPVGNRESPGQAEINPVHSPGPAGPVSHPSGQEVKELLPFACEVCGKRFKYRGKLAVHTRSHTGERLFQCNLCGKRFMQRIGLQFHQRTHTGERPYTCDICQKQFTQKSYLKCHKRSHTGEKPFECKDCKKVFTYKANLKEHQRIHSGEKPHKCSKCPRAFGRPATLRRHQKTHREATSQ

SEQ ID NO: 16498 - protein, 394 aa, Homo Sapiens
MNTNSKEVLSLGVQVPEAWEELLTMKVEAKSHLQWQESRLKRSNPLAREIFRRHFRQLCYQETPGPREALTRLQELCYQWLRPHVSTKEQILDLLVLEQFLSILPKELQGWVREHCPESGEEAVILLEDLERELDEPQHEMVAHRHRQEVLCKEMVPLAEQTPLTLQSQPKEPQLTCDSAQKCHSIGETDEVTKTEDRELVLRKDCPKIVEPHGKMFNEQTWEVSQQDPSHGEVGEHKDRIERQWGNLLGEGQHKCDECGKSFTQSSGLIRHQRIHTGERPYECNECGKAFSRSSGLFNHRGIHNIQKRYHCKECGKVFSQSAGLIQHQRIHKGEKPYQCSQCSKSYSRRSFLIEHQRSHTGERPHQCIECGKSFNRHCNLIRHQKIHTVAELV

SEQ ID NO: 16499 - protein, 578 aa, Homo Sapiens
MLSCNICGETVTSEPDMKAHLIVHMESEIICPFCKLSGVNYDEMCFHIETAHFEQNTLERNFERINTVQYGTSDNKKDNTLQCGMEVNSSILSGCASNHPKNSAQNLTKDSTLKHEGFYSENLTESRKFLKSREKQSSLTEIKGSVYETTYSPPECPFCGKIEEHSEDMETHVKTKHANLLDIPLEDCDQPLYDCPMCGLICTNYHILQEHVDLHLEENSFQQGMDRVQCSGDLQLAHQLQQEEDRKRRSEESRQEIEEFQKLQRQYGLDNSGGYKQQQLRNMEIEVNRGRMPPSEFHRRKADMMESLALGFDDGKTKTSGIIEALHRYYQNAATDVRRVWLSSVVDHFHSSLGDKGWGCGYRNFQMLLSSLLQNDAYNDCLKGMLIPCIPKIQSMIEDAWKEGFDPQGASQLNNRLQGTKAWIGACEVYILLTSLRVKCHIVDFHKSTGPLGTHPRLFEWILNYYSSEGEGSPKVVCTSKPPIYLQHQGHSRTVIGIEEKKNRTLCLLILDPGCPSREMQKLLKQDIEASSLKQLRKSMGNLKHKQYQILAVEGALSLEEKLARRQASQVFTAEKIP

SEQ ID NO: 16500 - protein, 799 aa, Homo Sapiens
MEIPKLLPARGTLQGGGGGGIPAGGGRVHRGPDSPAGQVPTRRLLLPRGPQDGGPGRRREEASTASRGPGPSLFAPRPHQPSGGGDDFFLVLLDPVGGDVETAGSGQAAGPVLREEAKAGPGLQGDESGANPAGCSAQGPHCLSAVPTPAPISAPGPAAAFAGTVTIHNQDLLLRFENGVLTLATPPPHAWEPGAAPAQQPRCLIAPQAGFPQAAHPGDCPELRSDLLLAEPAEPAPAPAPQEEAEGLAAALGPRGLLGSGPGVVLYLCPEALCGQTFAKKHQLKMHLLTHSSSQGQRPFKCPLGGCGWTFTTSYKLKRHLQSHDKLRPFGCPAEGCGKSFTTVYNLKAHMKGHEQENSFKCEVCEESFPTQAKLGAHQRSHFEPERPYQCAFSGCKKTFITVSALFSHNRAHFREQELFSCSFPGCSKQYDKACRLKIHLRSHTGERPFLCDFDGCGWNFTSMSKLLRHKRKHDDDRRFMCPVEGCGKSFTRAEHLKGHSITHLGTKPFVCPVAGCCARFSARSSLYIHSKKHLQDVDTWKSRCPISSCNKLFTSKHSMKTHMVKRHKVGQDLLAQLEAANSLTPSSELTSQRQNDLSDAEIVSLFSDVPDSTSAALLDTALVNSGILTIDVASVSSTLAGHLPANNNNSVGQAVDPPSLMATSDPPQSLDTSLFFGTAATGFQQSSLNMDEVSSVSVGPLGSLDSLAMKNSSPEPQALTPSSKLTVDTDTLTPSSTLCENSVSELLTPAKAEWSVHPNSDFFGQEGETQFGFPNAAGNHGSQKERNLITVTGSSFLV

SEQ ID NO: 16501 - protein, 803 aa, Homo Sapiens
MEIPKLLPARGTLQGGGGGGIPAGGGRVHRGPDSPAGQVPTRRLLLLRGPQDGGPGRRREEASTASRGPGPSLLAPRTDQPSGGGGGGGDDFFLVLLDPVGGDVETAGSGQAAGPVLREEAEEGPGLQGGESGANPAGPTALGPRCLSAVPTPAPISAPGPAAAFAGTVTIHNQDLLLRFENGVLTLATPPPHAWEPGAAPAQQPGCLIAPQAGFPHAAHPGDCPELPPDLLLAEPAEPAPAPAPEEEAEGPAAALGPRGPLGSGPGVVLYLCPEAQCGQTFAKKHQLKVHLLTHSSSQGQRPFKCPLGGCGWTFTTSYKLKRHLQSHDKLRPFGCPAEGCGKSFTTVYNLKAHMKGHEQENSFKCEVCEESFPTQAKLSAHQRSHFEPERPYQCAFSGCKKTFITVSALFSHNRAHFREQELFSCSFPGCSKQYDKACRLKIHLRSHTGERPFLCDFDGCGWNFTSMSKLLRHKRKHDDDRRFMCPVEGCGKSFTRAEHLKGHSITHLGTKPFVCPVAGCCARFSARSSLYIHSKKHLQDVDTWKSRCPISSCNKLFTSKHSMKTHMVKRHKVGQDLLAQLEAANSLTPSSELTSQRQNDLSDAEIVSLFSDVPDSTSAALLDTALVNSGILTIDVASVSSTLAGHLPANNNNSVGQAVDPPSLMATSDPPQSLDTSLFFGTAATGFQQSSLNMDEVSSVSVGPLGSLDSLAMKNSSPEPQALTPSSKLTVDTDALTPSSTLCENSVSELLTPTKAEWNVHPDSDFFGQEGETQFGFPNAAGNHGSQKETDLITVTGSSFLV

SEQ ID NO: 16502 - protein, 858 aa, Homo Sapiens
MDLPALLPAPTARGGQHGGGPGPLRRAPAPLGASPARRRLLLVRGPEDGGPGARPGEASGPSPPPAEDDSDGDSFLVLLEVPHGGAAAEAAGSQEAEPGSRVNLASRPEQGPSGPAAPPGPGVAPAGAVTISSQDLLVRLDRGVLALSAPPGPATAGAAAPRRAPQASGPSTPGYRCPEPQCALAFAKKHQLKVHLLTHGGGQGRRPFKCPLEGCGWAFTTSYKLKRHLQSHDKLRPFGCPVGGCGKKFTTVYNLKAHMKGHEQESLFKCEVCAERFPTHAKLSSHQRSHFEPERPYKCDFPGCEKTFITVSALFSHNRAHFREQELFSCSFPGCSKQYDKACRLKIHLRSHTGERPFICDSDSCGWTFTSMSKLLRHRRKHDDDRRFTCPVEGCGKSFTRAEHLKGHSITHLGTKPFECPVEGCCARFSARSSLYIHSKKHVQDVGAPKSRCPVSTCNRLFTSKHSMKAHMVRQHSRRQDLLPQLEAPSSLTPSSELSSPGQSELTNMDLAALFSDTPANASGSAGGSDEALNSGILTIDVTSVSSSLGGNLPANNSSLGPMEPLVLVAHSDIPPSLDSPLVLGTAATVLQQGSFSVDDVQTVSAGALGCLVALPMKNLSDDPLALTSNSNLAAHITTPTSSSTPRENASVPELLAPIKVEPDSPSRPGAVGQQEGSHGLPQSTLPSPAEQHGAQDTELSAGTGNFYLESGGSARTDYRAIQLAKEKKQRGAGSNAGASQSTQRKIKEGKMSPPHFHASQNSWLCGSLVVPSGGRPGPAPAAGVQCGAQGVQVQLVQDDPSGEGVLPSARGPATFLPFLTVDLPVYVLQEVLPSSGGPAGPEATQFPGSTINLQDLQ

SEQ ID NO: 16503 - protein, 903 aa, Homo Sapiens
MAASRSTRVTRSTVGLNGLDESFCGRTLRNRSIAHPEEISSNSQVRSRSPKKRPEPVPIQKGNNNGRTTDLKQQSTRESWVSPRKRGLSSSEKDNIERQAIENCERRQTEPVSPVLKRIKRCLRSEAPNSSEEDSPIKSDKESVEQRSTVVDNDADFQGTKRACRCLILDDCEKREIKKVNVSEEGPLNSAVVEEITGYLAVNGVDDSDSAVINCDDCQPDGNTKQNSIGSYVLQEKSVAENGDTDTQTSMFLDSRKEDSYIDHKVPCTDSQVQVKLEDHKIVTACLPVEHVNQLTTEPATGPFSETQSSLRDSEEEVDVVGDSSASKEQCKENTNNELDTSLESMPASGEPEPSPVLDCVSAQMMSLSEPQEHRYTLRTSPRRAAPTRGSPTKNSSPYRENGQFEENNLSPNETNATVSDNVSQSPTNPGEISQNEKGICCDSQNNGSEGVSKPPSEARLNIGHLPSAKESASQHITEEEDDDPDVYYFESDHVALKHNKDYQRLLQTIAVLEAQRSQAVQDLESLGRHQREALKNPIGFVEKLQKKADIGLPYPQRVVQLPEIVWDQYTHSLGNFEREFKNRKRHTRRVKLVFDKVGLPARPKSPLDPKKDGESLSYSMLPLSDGPEGSSSRPQMIRGRLCDDTKPETFNQLWTVEEQKKLEQLLIKYPPEEVESRRWQKIADELGNRTAKQVASRVQKYFIKLTKAGIPVPGRTPNLYIYSKKSSTSRRQHPLNKHLFKPSTFMTSHEPPVYMDEDDDRSCFHSHMNTAVEDASDDESIPIMYRNLPEYKELLQFKKLKKQKLQQMQAESGFVQHVGFKCDNCGIEPIQGVRWHCQDCPPEMSLDFCDSCSDCLHETDIHKEDHQLEPIYRSETFLDRDYCVSQGTSYNYLDPNYFPANR

SEQ ID NO: 16504 - protein, 455 aa, Homo Sapiens; identical to SEQ ID NO: 13589

SEQ ID NO: 16505 - protein, 461 aa, Homo Sapiens; identical to SEQ ID NO: 13591

SEQ ID NO: 16506 - protein, 417 aa, Homo Sapiens; identical to SEQ ID NO: 13599

SEQ ID NO: 16507 - protein, 655 aa, Homo Sapiens
MGTSPSSSTALASCSRIARRATATMIAGSLLLLGFLSTTTAQPEQKASNLIGTYRHVDRATGQVLTCDKCPAGTYVSEHCTNTSLRVCSSCPVGTFTRHENGIEKCHDCSQPCPWPMIEKLPCAALTDRECTCPPGMFQSNATCAPHTVCPVGWGVRKKGTETEDVRCKQCARGTFSDVPSSVMKCKAYTDCLSQNLVVIKPGTKETDNVCGTLPSFSSSTSPSPGTAIFPRPEHMETHEVPSSTYVPKGMNSTESNSSASVRPKVLSSIQEGTVPDNTSSARGKEDVNKTLPNLQVVNHQQGPHHRHILKLLPSMEATGGEKSSTPIKGPKRGHPRQNLHKHFDINEHLPWMIVLFLLLVLVVIVVCSIRKSSRTLKKGPRQDPSAIVEKAGLKKSMTPTQNREKWIYYCNGHGIDILKLVAAQVGSQWKDIYQFLCNASEREVAAFSNGYTADHERAYAALQHWTIRGPEASLAQLISALRQHRRNDVVEKIRGLMEDTTQLETDKLALPMSPSPLSPSPIPSPNAKLENSALLTVEPSPQDKNKGFFVDESEPLLRCDSTSSGSSALSRNGSFITKEKKDTVLRQVRLDPCDLQPIFDDMLHFLNPEELRVIEEIPQAEDKLDRLFEIIGVKSQEASQTLLDSVYSHLPDLL

SEQ ID NO: 16508 - protein, 335 aa, Homo Sapiens; identical to SEQ ID NO: 5109

SEQ ID NO: 16509 - protein, 2511 aa, Homo Sapiens
MEEVVIAGMSGKLPESENLQEFWDNLIGGVDMVTDDDRRWKAGLYGLPRRSGKLKDLSRFDASFFGVHPKQAHTMDPQLRLLLEVTYEAIVDGGINPDSLRGTHTGVWVGVSGSETSEALSRDPETLVGYSMVGCQRAMMANRLSFFFDFRGPSIALDTACSSSLMALQNAYQAIHSGQCPAAIVGGINVLLKPNTSVQFLRLGMLSPEGTCKAFDTAGNGYCRSEGVVAVLLTKKSLARRVYATILNAGTNTDGFKEQGVTFPSGDIQEQLIRSLYQSAGVAPESFEYIEAHGTGTKVGDPQELNGITRALCATRQEPLLIGSTKSNMGHPEPASGLAALAKVLLSLEHGLWAPNLHFHSPNPEIPALLDGRLQVVDQPLPVRGGNVGINSFGFGGSNVHIILRPNTQPPPAPAPHATLPRLLRASGRTPEAVQKLLEQGLRHSQDLAFLSMLNDIAAVPATAMPFRGYAVLGGERGGPEVQQVPAGERPLWFICSGMGTQWRGMGLSLMRLDRFRDSILRSDEAVKPFGLKVSQLLLSTDESTFDDIVHSFVSLTAIQIGLIDLLSCMGLRPDGIVGHSLGEVACGYADGCLSQEEAVLAAYWRGQCIKEAHLPPGAMAAVGLSWEECKQRCPPGVVPACHNSKDTVTISGPQAPVFEFVEQLRKEGVFAKEVRTGGMAFHSYFMEAIAPPLLQELKKVIREPKPRSARWLSTSIPEAQWHSSLARTSSAEYNVNNLVSPVLFQEALWHVPEHAVVLEIAPHALLQAVLKRGLKPSCTIIPLMKKDHRDNLEFFLAGIGRLHLSGIDANPNALFPPVEFPAPRGTPLISPLIKWDHSLAWDVPAAEDFPNGSGSPSAAIYNIDTSSESPDHYLVDHTLDGRVLFPATGYLSIVWKTLARALGLGVEQLPVVFEDVVLHQATILPKTGTVSLEVRLLEASRAFEVSENGNLVVSGKVYQWDDPDPRLFDHPESPTPNPTEPLFLAQAEVYKELRLRGYDYGPHFQGILEASLEGDSGRLLWKDNWVSFMDTMLQMSILGSAKHGLYLPTRVTAIHIDPATHRQKLYTLQDKAQVADVVVSRWLRVTVAGGVHISGLHTESAPRRQQEQQVPILEKFCFTPHTEEGCLSERAALQEELQLCKGLVQALQTKVTQQGLKMVVPGLDGAQIPRDPSQQELPRLLSAACRLQLNGNLQLELAQVLAQERPKLPEDPLLSGLLDSPALKACLDTAVENMPSLKMKVVEVLAGHGHLYSRIPGLLSPHPLLQLSYTATDRHPQALEAAQAELQQHDVAQGQWDPADPAPSALGSADLLVCNCAVAALGDPASALSNMVAALREGGFLLLHTLLRGHPLGDIVAFLTSTEPQYGQGILSQDAWESLFSRVSLRLVGLKKSFYGSTLFLCRRPTPQDSPIFLPVDDTSFRWVESLKGILADEDSSRPVWLKAINCATSGVVGLVNCLRREPGGNRLRCVLLSNLSSTSHVPEVDPGSAELQKVLQGDLVMNVYRDGAWGAFRHFLLEEDKPEEPTAHAFVSTLTRGDLSSIRWVCSSLRHAQPTCPGAQLCTVYYASLNFRDIMLATGKLSPDAIPGKWTSQDSLLGMEFSGRDASGKRVMGLVPAKGLATSVLLSPDFLWDVPSNWTLEEAASVPVVYSTAYYALVVRGRVRPGETLLIHSGSGGVGQAAIAIALSLGCRVFTTVGSAEKRAYLQARFPQLDSTSFANSRDTSFEQHVLWHTGGKGVDLVLNSLAEEKLQASVRCLATHGRFLEIGKFDLSQNHPLGMAIFLKNVTFHGVLLDAFFNESSADWREVWALVQAGIRDGVVRPLKCTVFHGAQVEDAFRYMAQGKHIGKVVVQVLAEEPEAVLKGAKPKLMSAISKTFCPAHKSYIIAGGLGGFGLELAQWLIQRGVQKLVLTSRSGIRTGYQAKQVRRWRRQGVQVQVSTSNISSLEGARGLIAEAAQLGPVGGVFNLAVVLRDGLLENQTPEFFQDVCKPKYSGTLNLDRVTREACPELDYFVVFSSVSCGRGNAGQSNYGFANSAMERICEKRRHEGLPGLAVQWGAIGDVGILVETMSTNDTIVSGTLPQRMASCLEVLDLFLNQPHMVLSSFVLAEKAAAYRDRDSQRDLVEAVAHILGIRDLAAVNLDSSLADLGLDSLMSVEVRQTLERELNLVLSVREVRQLTLRKLQELSSKADEASELACPTPKEDGLAQQQTQLNLRSLLVNPEGPTLMRLNSVQSSERPLFLVHPIEGSTTVFHSLASRLSIPTYGLQCTRAAPLDSIHSLAAYYIDCIRQVQPEGPYRVAGYSYGACVAFEMCSQLQAQQSPAPTHNSLFLFDGSPTYVLAYTQSYRAKLTPGCEAEAETEAICFFVQQFTDMEHNRVLEALLPLKGLEERVAAAVDLIIKSHQGLDRQELSFAARSFYYKLRAAEQYTPKAKYHGNVMLLRAKTGGAYGEDLGADYNLSQVCDGKVSVHVIEGDHRTLLEGSGLESIISIIHSSLAEPRVSVREG

SEQ ID NO: 16510 - protein, 281 aa, Homo Sapiens
MQQPFNYPYPQIYWVDSSASSPWAPPGTVLPCPTSVPRRPGQRRPPPPPPPPPLPPPPPPPPLPPLPLPPLKKRGNHSTGLCLLVMFFMVLVALVGLGLGMFQLFHLQKELAELRESTSQMHTASSLEKQIGHPSPPPEKKELRKVAHLTGKSNSRSMPLEWEDTYGIVLLSGVKYKKGGLVINETGLYFVYSKVYFRGQSCNNLPLSHKVYMRNSKYPQDLVMMEGKMMSYCTTGQMWARSSYLGAVFNLTSADHLYVNVSELSLVNFEESQTFFGLYKL

SEQ ID NO: 16511 - protein, 393 aa, Homo Sapiens [sequence omitted]

SEQ ID NO: 16512 - protein, 455 aa, Homo Sapiens; identical to SEQ ID NO: 13589

SEQ ID NO: 16513 - protein, 461 aa, Homo Sapiens; identical to SEQ ID NO: 13591

SEQ ID NO: 16514 - protein, 468 aa, Homo Sapiens
MAPPPARVHLGAFLAVTPNPGSAASGTEAAAATPSKVWGSSAGRIEPRGGGRGALPTSMGQHGPSARARAGRAPGPRPAREASPRLRVHKTFKFVVVGVLLQVVPSSAATIKLHDQSIGTQQWEHSPLGELCPPGSHRSEHPGACNRCTEGVGYTNASNNLFACLPCTACKSDEEERSPCTTTRNTACQCKPGTFRNDNSAEMCRKCSRGCPRGMVKVKDCTPWSDIECVHKESGNGHNIWVILVVTLVVPLLLVAVLIVCCCIGSGCGGDPKCMDRVCFWRLGLLRGPGAEDNAHNEILSNADSLSTFVSEQQMESQEPADLTGVTVQSPGEAQCLLGPAEAEGSQRRRLLVPANGADPTETLMLFFDKFANIVPFDSWDQLMRQLDLTKNEIDVVRAGTAGPGDALYAMLMKWVNKTGRNASIHTLLDALERMEERHAREKIQDLLVDSGKFIYLEDGTGSAVSLE

SEQ ID NO: 16515 - protein, 440 aa, Homo Sapiens
MEQRGQNAPAASGARKRHGPGPREARGARPGPRVPKTLVLVVAAVLLLVSAESALITQQDLAPQQRAAPQQKRSSPSEGLCPPGHHISEDGRDCISCKYGQDYSTHWNDLLFCLRCTRCDSGEVELSPCTTTRNTVCQCEEGTFREEDSPEMCRKCRTGCPRGMVKVGDCTPWSDIECVHKESGTKHSGEVPAVEETVTSSPGTPASPCSLSGIIIGVTVAAVVLIVAVFVCKSLLWKKVLPYLKGICSGGGGDPERVDRSSQRPGAEDNVLNEIVSILQPTQVPEQEMEVQEPAEPTGVNMLSPGESEHLLEPAEAERSQRRRLLVPANEGDPTETLRQCFDDFADLVPFDSWEPLMRKLGLMDNEIKVAKAEAAGHRDTLYTMLIKWVNKTGRDASVHTLLDALETLGERLAKQKIEDHLLSSGKFMYLEGNADSAMS

SEQ ID NO: 16516 - protein, 208 aa, Homo Sapiens
MDPFLVLLHSVSSSLSSSELTELKFLCLGRVGKRKLERVQSGLDLFSMLLEQNDLEPGHTELLRELLASLRRHDLLRRVDDFEAGAAAGAAPGEEDLCAAFNVICDNVGKDWRRLARQLKVSDTKIDSIEDRYPRNLTERVRESLRIWKNTEKENATVAHLVGALRSCQMNLVADLVQEVQQARDLQNRSGAMSPMSWNSDASTSEAS

SEQ ID NO: 16517 - protein, 312 aa, Homo Sapiens
MAAGQNGHEEWVGSAYLFVESSLDKVVLSDAYAHPQQKVAVYRALQAALAESGGSPDVLQMLKIHRSDPQLIVQLRFCGRQPCGRFLRAYREGALRAALQRSLAAALAQHSVPLQLELRAGAERLDALLADEERCLSCILAQQPDRLRDEELAELEDALRNLKCGSGARGGDGEVASAPLQPPVPSLSEVKPPPPPPPAQTFLFQGQPVVNRPLSLKDQQTFARSVGLKWRKVGRSLQRGCRALRDPALDSLAYEYEREGLYEQAFQLLRRFVQAEGRRATLQRLVEALEENELTSLAEDLLGLTDPNGGLA

SEQ ID NO: 16518 - protein, 192 aa, Homo Sapiens
MDGSGEQPRGGGPTSSEQIMKTGALLLQGFIQDRAGRMGGEAPELALDPVPQDASTKKLSECLKRIGDELDSNMELQRMIAAVDTDSPREVFFRVAADMFSDGNFNWGRVVALFYFASKLVLKALCTKVPELIRTIMGWTLDFLRERLLGWIQDQGGWDGLLSYFGTPTWQTVTIFVAGVLTASLTIWKKMG

SEQ ID NO: 16519 - protein, 211 aa, Homo Sapiens
MASGQGPGPPRQECGEPALPSASEEQVAQDTEEVFRSYVFYRHQQEQEAEGVAAPADPEMVTLPLQPSSTMGQVGRQLAIIGDDINRRYDSEFQTMLQHLQPTAENAYEYFTKIATSLFESGINWGRVVALLGFGYRLALHVYQHGLTGFLGQVTRFVVDFMLHHCIARWIAQRGGWVAALNLGNGPILNVLVVLGVVLLGQFVVRRFFKS

SEQ ID NO: 16520 - protein, 246 aa, Homo Sapiens
MTMDKSELVQKAKLAEQAERYDDMAAAMKAVTEQGHELSNEERNLLSVAYKNVVGARRSSWRVISSIEQKTERNEKKQQMGKEYREKIEAELQDICNDVLELLDKYLIPNATQPESKVFYLKMKGDYFRYLSEVASGDNKQTTVSNSQQAYQEAFEISKKEMQPTHPIRLGLALNFSVFYYEILNSPEKACSLAKTAFDEAIAELDTLNEESYKDSTLIMQLLRDNLTLWTSENQGDEGDAGEGEN

SEQ ID NO: 16521 - protein, 239 aa, Homo Sapiens
MAHAGRTGYDNREIVMKYIHYKLSQRGYEWDAGDVGAAPPGAAPAPGIFSSQPGHTPHPAASRDPVARTSPLQTPAAPGAAAGPALSPVPPVVHLTLRQAGDDFSRRYRRDFAEMSSQLHLTPFTARGRFATVVEELFRDGVNWGRIVAFFEFGGVMCVESVNREMSPLVDNIALWMTEYLNRHLHTWIQDNGGWDAFVELYGPSMRPLFDFSWLSLKTLLSLALVGACITLGAYLGHK

SEQ ID NO: 16522 - protein, 105 aa, Homo Sapiens
MGDVEKGKKIFIMKCSQCHTVEKGGKHKTGPNLHGLFGRKTGQAPGYSYTAANKNKGIIWGEDTLMEYLENPKKYIPGTKMIFVGIKKKEERADLIAYLKKATNE

SEQ ID NO: 16523 - protein, 239 aa, Homo Sapiens
MAALKSWLSRSVTSFFRYRQCLCVPVVANFKKRCFSELIRPWHKTVTIGFGVTLCAVPIAQKSEPHSLSSEALMRRAVSLVTDSTSTFLSQTTYALIEAITEYTKAVYTLTSLYRQYTSLLGKMNSEEEDEVWQVIIGARAEMTSKHQEYLKLETTWMTAVGLSEMAAEAAYQTGADQASITARNHIQLVKLQVEEVHQLSRKAETKLAEAQIEELRQKTQEEGEERAESEQEAYLRED

SEQ ID NO: 16524 - protein, 422 aa, Homo Sapiens
MALRGSHRLEVIFKRCIASPVLHSHAANRRSSQLAIKEGDPNSNGNSGQYQQNGEQKEKGWRRLVRFFVPFSLGAVVSAAIIQREDLTPTIAASKMTGRRRDFNFIADVVAGCADSVVYIEIKDTRHFDYFSGQPITASNGSGFIIEQNGLILTNAHVVINKPHTMVQVRLSDGRTFPATIEDVDQTSDLATLRIQVNNLSVMRLGKSSTLRSGEWVVALGSPLALSNTVTAGVISSTQRASQELGLRNRDINYLQTDAAITFGNSGGPLVNLDGEAIGVNSMKVTAGISFAIPIDYVKVFLERAAEKRKKGSAYKTGYPVKRYMGITMLTLTPDILFELKSRSQNMPSNLTHGVLVWKVIVGSPAHSGGLQPGDIVTHINKKEIKNSSDVYDALADNSKTLDIVILRGVKQMHVTITPEDP

SEQ ID NO: 16525 - protein, 613 aa, Homo Sapiens
MFRCGGLAAGALKQKLVPLVRTVCVRSPRQRNRLPGNLFQRWHVPLELQMTRQMASSGASGGKIDNSVLVLIVGLSTVGAGAYAYKTMKEDEKRYNERISGLGLTPEQKQKKAALSASEGEEVPQDKAPSHVPFLLIGGGTAAFAAARSIRARDPGARVLIVSEDPELPYMRPPLSKELWFSDDPNVTKTLRFKQWNGKERSIYFQPPSFYVSAQDLPHIENGGVAVLTGKKVVQLDVRDNMVKLNDGSQITYEKCLIATGGTPRSLSAIDRAGAEVKSRTTLFRKIGDFRSLEKISREVKSITIIGGGFLGSELACALGRKARALGTEVIQLFPEKGNMGKILPEYLSNWTMEKVRREGVKVMPNAIVQSVGVSSGKLLIKLKDGRKVETDHIVAAVGLEPNVELAKTGGLEIDSDFGGFRVNAELQARSNIWVAGDAACFYDIKLGRRRVEHHDHAVVSGRLAGENMTGAAKPYWHQSMFWSDLGPDVGYEAIGLVDSSLPTVGVFAKATAQDNPKSATEQSGTGIRSESETESEASEITIPPSTPAVPQAPVQGEDYGKGVIFYLRDKVVVGIVLWNIFNRMPIARKIIKDGEQHEDLNEVAKLFNIHED

SEQ ID NO: 16526 - protein, 368 aa, Homo Sapiens; identical to SEQ ID NO: 4940

SEQ ID NO: 16527 - protein, 416 aa, Homo Sapiens
MDEADRRLLRRCRLRLVEELQVDQLWDALLSRELFRPHMIEDIQRAGSGSRRDQARQLIIDLETRGSQALPLFISCLEDTGQDMLASFLRTNRQAAKLSKPTLENLTPVVLRPEIRKPEVLRPETPRPVDIGSGGFGDVGALESLRGNADLAYILSMEPCGHCLIINNVNFCRESGLRTRTGSNIDCEKLRRRFSSLHFMVEVKGDLTAKKMVLALLELAQQDHGALDCCVVVILSHGCQASHLQFPGAVYGTDGCPVSVEKIVNIFNGTSCPSLGGKPKLFFIQACGGEQKDHGFEVASTSPEDESPGSNPEPDATPFQEGLRTFDQLDAISSLPTPSDIFVSYSTFPGFVSWRDPKSGSWYVETLDDIFEQWAHSEDLQSLLLRVANAVSVKGIYKQMPGCFNFLRKKLFFKTS

SEQ ID NO: 16528 - protein, 452 aa, Homo Sapiens
MAAPSAGSWSTFQHKELMAADRGRRILGVCGMHPHHQETLKKNRVVLAKQLLLSELLEHLLEKDIITLEMRELIQAKVGSFSQNVELLNLLPKRGPQAFDAFCEALRETKQGHLEDMLLTTLSGLQHVLPPLSCDYDLSLPFPVCESCPLYKKLRLSTDTVEHSLDNKDGPVCLQVKPCTPEFYQTHFQLAYRLQSRPRGLALVLSNVHFTGEKELEFRSGGDVDHSTLVTLFKLLGYDVHVLCDQTAQEMQEKLQNFAQLPAHRVTDSCIVALLSHGVEGAIYGVDGKLLQLQEVFQLFDNANCPSLQNKPKMFFIQACRGDETDRGVDQQDGKNHAGSPGCEESDAGKEKLPKMRLPTRSDMICGYACLKGTAAMRNTKRGSWYIEALAQVFSERACDMHVADMLVKVNALIKDREGYAPGTEFHRCKEMSEYCSTLCRHLYLFPGHPPT

SEQ ID NO: 16529 - protein, 479 aa, Homo Sapiens
MDFSRNLYDIGEQLDSEDLASLKFLSLDYIPQRKQEPIKDALMLFQRLQEKRMLEESNLSFLKELLFRINRLDLLITYLNTRKEEMERELQTPGRAQISAYRVMLYQISEEVSRSELRSFKFLLQEEISKCKLDDDMNLLDIFIEMEKRVILGEGKLDILKRVCAQINKSLLKIINDYEEFSKERSSSLEGSPDEFSNGEELCGVMTISDSPREQDSESQTLDKVYQMKSKPRGYCLIINNHNFAKAREKVPKLHSIRDRNGTHLDAGALTTTFEELHFEIKPHDDCTVEQIYEILKIYQLMDHSNMDCFICCILSHGDKGIIYGTDGQEAPIYELTSQFTGLKCPSLAGKPKVFFIQACQGDNYQKGIPVETDSEEQPYLEMDLSSPQTRYIPDEADFLLGMATVNNCVSYRNPAEGTWYIQSLCQSLRERCPRGDDILTILTEVNYEVSNKDDKKNMGKQMPQPTFTLRKKLVFPSD

SEQ ID NO: 16530 - protein, 521 aa, Homo Sapiens
MKSQGQHWYSSSDKNCKVSFREKLLIIDSNLGVQDVENLKFLCIGLVPNKKLEKSSSASDVFEHLLAEDLLSEEDPFFLAELLYIIRQKKLLQHLNCTKEEVERLLPTRQRVSLFRNLLYELSEGIDSENLKDMIFLLKDSLPKTEMTSLSFLAFLEKQGKIDEDNLTCLEDLCKTVVPKLLRNIEKYKREKAIQIVTPPVDKEAESYQGEEELVSQTDVKTFLEALPQESWQNKHAGSNGNRATNGAPSLVSRGMQGASANTLNSETSTKRAAVYRMNRNHRGLCVIVNNHSFTSLKDRQGTHKDAEILSHVFQWLGFTVHIHNNVTKVEMEMVLQKQKCNPAHADGDCFVFCILTHGRFGAVYSSDEALIPIREIMSHFTALQCPRLAEKPKLFFIQACQGEEIQPSVSIEADALNPEQAPTSLQDSIPAEADFLLGLATVPGYVSFRHVEEGSWYIQSLCNHLKKLVPRMLKFLEKTMEIRGRKRTVWGAKQISATSLPTAISAQTPRPPMRRWSSVS

SEQ ID NO: 16531 - protein, 277 aa, Homo Sapiens
MENTENSVDSKSIKNLEPKIIHGSESMDSGISLDNSYKMDYPEMGLCIIINNKNFHKSTGMTSRSGTDVDAANLRETFRNLKYEVRNKNDLTREEIVELMRDVSKEDHSKRSSFVCVLLSHGEEGIIFGTNGPVDLKKITNFFRGDRCRSLTGKPKLFIIQACRGTELDCGIETDSGVDDDMACHKIPVEADFLYAYSTAPGYYSWRNSKDGSWFIQSLCAMLKQYADKLEFMHILTRVNRKVATEFESFSFDATFHAKKQIPCIVSMLTKELYFYH

SEQ ID NO: 16532 - protein, 293 aa, Homo Sapiens
MSSASGLRRGHPAGGEENMTETDAFYKREMFDPAEKYKMDHRRRGIALIFNHERFFWHLTLPERRGTCADRDNLTRRFSDLGFEVKCFNDLKAEELLLKIHEVSTVSHADADCFVCVFLSHGEGNHIYAYDAKIEIQTLTGLFKGDKCHSLVGKPKIFIIQACRGNQHDVPVIPLDVVDNQTEKLDTNITEVDAASVYTLPAGADFLMCYSVAEGYYSHRETVNGSWYIQDLCEMLGKYGSSLEFTELLTLVNRKVSQRRVDFCKDPSAIGKKQVPCFASMLTKKLHFFPKSN

SEQ ID NO: 16533 - protein, 303 aa, Homo Sapiens
MADDQGCIEEQGVEDSANEDSVDAKPDRSSFVPSLFSKKKKNVTMRSIKTTRDRVPTYQYNMNFEKLGKCIIINNKNFDKVTGMGVRNGTDKDAEALFKCFRSLGFDVIVYNDCSCAKMQDLLKKASEEDHTNAACFACILLSHGEENVIYGKDGVTPIKDLTAHFRGDRCKTLLEKPKLFFIQACRGTELDDGIQADSGPINDTDANPRYKIPVEADFLFAYSTVPGYYSWRSPGRGSWFVQALCSILEEHGKDLEIMQILTRVNDRVARHFESQSDDPHFHEKKQIPCVVSMLTKELYFSQ

SEQ ID NO: 16534 - protein, 233 aa, Homo Sapiens
MSTESMIRDVELAEEALPKKTGGPQGSRRCLFLSLFSFLIVAGATTLFCLLHFGVIGPQREEFPRDLSLISPLAQAVRSSSRTPSDKPVAHVVANPQAEGQLQWLNRRANALLANGVELRDNQLVVPSEGLYLIYSQVLFKGQGCPSTHVLLTHTISRIAVSYQTKVNLLSAIKSPCQRETPEGAEAKPWYEPIYLGGVFQLEKGDRLSAEINRPDYLDFAESGQVYFGIIAL

SEQ ID NO: 16535 - protein, 249 aa, Homo Sapiens; identical to SEQ ID NO: 13611

SEQ ID NO: 16536 - protein, 129 aa, Homo Sapiens; identical to SEQ ID NO: 13567

SEQ ID NO: 16537 - protein, 281 aa, Homo Sapiens [sequence omitted]

SEQ ID NO: 16538 - protein, 251 aa, Homo Sapiens; identical to SEQ ID NO: 13613

SEQ ID NO: 16539 - protein, 671 aa, Homo Sapiens
MQPDMSLNVIKMKSSDFLESAELDSGGFGKVSLCFHRTQGLMIMKTVYKGPNCIEHNEALLEEAKMMNRLRHSRVVKLLGVIIEEGKYSLVMEYMEKGNLMHVLKAEMSTPLSVKGRIILEIIEGMCYLHGKGVIHKDLKPENILVDNDFHIKIADLGLASFKMWSKLNNEEHNELREVDGTAKKNGGTLYYMAPEHLNDVNAKPTEKSDVYSFAVVLWAIFANKEPYENAICEQQLIMCIKSGNRPDVDDITEYCPREIISLMKLCWEANPEARPTFPGIEEKFRPFYLSQLEESVEEDVKSLKKEYSNENAVVKRMQSLQLDCVAVPSSRSNSATEQPGSLHSSQGLGMGPVEESWFAPSLEHPQEENEPSLQSKLQDEANYHLYGSRMDRQTKQQPRQNVAYNREEERRRRVSHDPFAQQRPYENFQNTEGKGTAYSSAASHGNAVHQPSGLTSQPQVLYQNNGLYSSHGFGTRPLDPGTAGPRVWYRPIPSHMPSLHNIPVPETNYLGNTPTMPFSSLPPTDESIKYTIYNSTGIQIGAYNYMEIGGTSSSLLDSTNTNFKEEPAAKYQAIFDNTTSLTDKHLDPIRENLGKHWKNCARKLGFTQSQIDEIDHDYERDGLKEKVYQMLQKWVMREGIKGATVGKLAQALHQCSRIDLLSSLIYVSQN

SEQ ID NO: 16540 - protein, 616 aa, Homo Sapiens
MEILQNSPFLRGLCRTSAPADLQYDNTSELFRISTFAKFPSTAPVTERSLARAGFFYTGICDRVQCFRCNVTIDNWQTGECPAERHKQMSPNCAFIQSLPSTANLLSSSHSAFSPLRNATILQLNLPAVTSASGQTDEQVGYLNMSNLAPSSPLSSRGVEDMSHQRPSACHNPSMRREQDRLDTFQNWTLTTITPAELAKAGFYYLSQGDRVACFSCGGHLSNWEPGDRAMSEHQRHYPNCRFVRGDRADNISIAGGLANVSNPAMQQCEERLLTFVNWPARIPVRPDQLAKAGFYYVGRNDDVKCFCCDGGLRCWESGDDPWVEHAKWFPRCEYLLQEKGQEFVHQIQARFPRLFEQLLNNGDSREFVDPPVVHLGPGEERSEDAVMMNTPVVKAALEMGFDRNLVKQTVQSKILTSGENYKTVQELVSDLLSAEDEKREEEREMFAEEMASDGFTFLKKHHAALTQRLKSVQSLMDHLLEENVISQKEYDTIRNCTSVKQQTGQLIDLVLSKGNAAAEVFRNWIKKNDVYLLRELMAQTNEAVSPSQDLSDLPMEEQLRRLQEERTCKVCMDKEVNIVFIPCGHLVVCKECAPSLRKCPICRGMVKGTVRTFLS

SEQ ID NO: 16541 - protein, 501 aa, Homo Sapiens
MAAASVTPPGSLELLQPGFSKTLLGTKLEAKYLCSACRNVLRRPFQAQCGHRYCSFCLASILSSGPQNCAACVHEGIYEEGISILESSSAFPDNAARREVESLPAVCPSDGCTWKGTLKEYESCHEGRCPLMLTECPACKGLVRLGEKERHLEHECPERSLSCRHCRAPCCGADVKAHHEVCPKFPLTCDGCGKKKIPREKFQDHVKTCGKCRVPCRFHAIGCLETVEGEKQQEHEVQWLREHLAMLLSSVLEAKPLLGDQSHAGSELLQRCESLEKKTATFENIVCVLNREVERVAMTAEACSRQHRLDQDKIEALSSKVQQLERSIGLKDLAMADLEQKVLEMEASTYDGVFIWKISDFARKRQEAVAGRIPAIFSPAFYTSRYGYKMCLRIYLNGDGTGRGTHLSLFFVVMKGPNDALLRWPFNQKVTLMLLDQNNREHVIDAFRPDVTSSSFQRPVNDMNIASGCPLFCPVSKMEAKNSYVRDDAIFIKAIVDLTGL

SEQ ID NO: 16542 - protein, 826 aa, Homo Sapiens; identical to SEQ ID NO: 15084

SEQ ID NO: 16543 - protein, 213 aa, Homo Sapiens
MPRRAENWDEAEVGAEEAGVEEYGPEEDGGEESGAEESGPEESGPEELGAEEEMEAGRPRPVLRSVNSREPSQVIFCNRSPRVVLPVWLNFDGEPQPYPTLPPGTGRRIHSYRGHLWLFRDAGTHDGLLVNQTELFVPSLNVDGQPIFANITLPVYTLKERCLQVVRSLVKPENYRRLDIVRSLYEDLEDHPNVQKDLERLTQERIAHQRMGD

SEQ ID NO: 16544 - protein, 492 aa, Homo Sapiens
MEPSSKKLTGRLMLAVGGAVLGSLQFGYNTGVINAPQKVIEEFYNQTWVHRYGESILPTTLTTLWSLSVAIFSVGGMIGSFSVGLFVNRFGRRNSMLMMNLLAFVSAVLMGFSKLGKSFEMLILGRFIIGVYCGLTTGFVPMYVGEVSPTALRGALGTLHQLGIVVGILIAQVFGLDSIMGNKDLWPLLLSIIFIPALLQCIVLPFCPESPRFLLINRNEENRAKSVLKKLRGTADVTHDLQEMKEESRQMMREKKVTILELFRSPAYRQPILIAVVLQLSQQLSGINAVFYYSTSIFEKAGVQQPVYATIGSGIVNTAFTVVSLFVVERAGRRTLHLIGLAGMAGCAILMTIALALLEQLPWMSYLSIVAIFGFVAFFEVGPGPIPWFIVAELFSQGPRPAAIAVAGFSNWTSNFIVGMCFQYVEQLCGPYVFIIFTVLLVLFFIFTYFKVPETKGRTFDEIASGFRQGGASQSDKTPEELFHPLGADSQV

SEQ ID NO: 16545 - protein, 262 aa, Homo Sapiens; identical to SEQ ID NO: 7713

SEQ ID NO: 16546 - protein, 630 aa, Homo Sapiens
MELQPPEASIAVVSIPRQLPGSHSEAGVQGLSAGDDSELGSHCVAQTGLELLASGDPLPSASQNAEMIETGSDCVTQAGLQLLASSDPPALASKNAEVTGTMSQDTEVDMKEVELNELEPEKQPMNAASGAAMSLAGAEKNGLVKIKVAEDEAEAAAAAKFTGLSKEELLKVAGSPGWVRTRWALLLLFWLGWLGMLAGAVVIIVRAPRCRELPAQKWWHTGALYRIGDLQAFQGHGAGNLAGLKGRLDYLSSLKVKGLVLGPIHKNQKDDVAQTDLLQIDPNFGSKEDFDSLLQSAKKKSIRVILDLTPNYRGENSWFSTQVDTVATKVKDALEFWLQAGVDGFQVRDIENLKDASSFLAEWQNITKGFSEDRLLIAGTNSSDLQQILSLLESNKDLLLTSSYLSDSGSTGEHTKSLVTQYLNATGNRWCSWSLSQARLLTSFLPAQLLRLYQLMLFTLPGTPVFSYGDEIGLDAAALPGQPMEAPVMLWDESSFPDIPGAVSANMTVKGQSEDPGSLLSLFRRLSDQRSKERSLLHGDFHAFSAGPGLFSYIRHWDQNERFLVVLNFGDVGLSAGLQASDLPASASLPAKADLLLSTQPGREEGSPLELERLKLEPHEGLLLRFPYAA

SEQ ID NO: 16547 - protein, 541 aa, Homo Sapiens
MVADPPRDSKGLAAAEPTANGGLALASIEDQGAAAGGYCGSRDQVRRCLRANLLVLLTVVAVVAGVALGLGVSGAGGALALGPERLSAFVFPGELLLRLLRMIILPLVVCSLIGGAASLDPGALGRLGAWALLFFLVTTLLASALGVGLALALQPGAASAAINASVGAAGSAENAPSKEVLDSFLDLARNIFPSNLVSAAFRSYSTTYEERNITGTRVKVPVGQEVEGMNILGLVVFAIVFGVALRKLGPEGELLIRFFNSFNEATMVLVSWIMWYAPVGIMFLVAGKIVEMEDVGLLFARLGKYILCCLLGHAIHGLLVLPLIYFLFTRKNPYRFLWGIVTPLATAFGTSSSSATLPLMMKCVEENNGVAKHISRFILPIGATVNMDGAALFQCVAAVFIAQLSQQSLDFVKIITILVTATASSVGAAGIPAGGVLTLAIILEAVNLPVDHISLILAVDWLVDRSCTVLNVEGDALGAGLLQNYVDRTESRSTEPELIQVKSELPLDPLPVPTEEGNPLLKHYRGPAGDATVASEKESVM

SEQ ID NO: 16548 - protein, 629 aa, Homo Sapiens
MGCKVLLNIGQQMLRRKVVDCSREETRLSRCLNTFDLVALGVGSTLGAGVYVLAGAVARENAGPAIVISFLIAALASVLAGLCYGEFGARVPKTGSAYLYSYVTVGELWAFITGWNLILSYIIGTSSVARAWSATFDELIGRPIGEFSRTHMTLNAPGVLAENPDIFAVIIILILTGLLTLGVKESAMVNKIFTCINVLVLGFIMVSGFVKGSVKNWQLTEEDFGNTSGRLCLNNDTKEGKPGVGGFMPFGFSGVLSGAATCFYAFVGFDCIATTGEEVKNPQKAIPVGIVASLLICFIAYFGVSAALTLMMPYFCLDNNSPLPDAFKHVGWEGAKYAVAVGSLCALSASLLGSMFPMPRVIYAMAEDGLLFKFLANVNDRTKTPIIATLASGAVAAVMAFLFDLKDLVDLMSIGTLLAYSLVAACVLVLRYQPEQPNLVYQMASTSDELDPADQNELASTNDSQLGFLPEAEMFSLKTILSPKNMEPSKISGLIVNISTSLIAVLIITFCIVTVLGREALTKGALWAVFLLAGSALLCAVVTGVIWRQPESKTKLSFKVPFLPVLPILSIFVNVYLMMQLDQGTWVRFAVWMLIGFIIYFGYGLWHSEEASLDADQARTPDGNLDQCK

SEQ ID NO: 16549 - protein, 658 aa, Homo Sapiens
MIPCRAALTFARCLIRRKIVTLDSLEDTKLCRCLSTMDLIALGVGSTLGAGVYVLAGEVAKADSGPSIVVSFLIAALASVMAGLCYAEFGARVPKTGSAYLYTYVTVGELWAFITGWNLILSYVIGTSSVARAWSGTFDELLSKQIGQFLRTYFRMNYTGLAEYPDFFAVCLILLLAGLLSFGVKESAWVNKVFTAVNILVLLFVMVAGFVKGNVANWKISEEFLKNISASAREPPSENGTSIYGAGGFMPYGFTGTLAGAATCFYAFVGFDCIATTGEEVRNPQKAIPIGIVTSLLVCFMAYFGVSAALTLMMPYYLLDEKSPLPVAFEYVGWGPAKYVVAAGSLCALSTSLLGSIFPMPRVIYAMAEDGLLFKCLAQINSKTKTPIIATLSSGAVAALMAFLFDLKALVDMMSIGTLMAYSLVAACVLILRYQPGLSYDQPKCSPEKDGLGSSPRVTSKSESQVTMLQRQGFSMRTLFCPSLLPTQQSASLVSFLVGFLAFLVLGLSVLTTYGVHAITRLEAWSLALLALFLVLFVAIVLTIWRQPQNQQKVAFMVPFLPFLPAFSILVNIYLMVQLSADTWVRFSIWMAIGFLIYFSYGIRHSLEGHLRDENNEEDAYPDNVHAAAEEKSAIQANDHHPRNLSSPFIFHEKTSEF

SEQ ID NO: 16550 - protein, 619 aa, Homo Sapiens
MPWQAFRRFGQKLVRRRTLESGMAETRLARCLSTLDLVALGVGSTLGAGVYVLAGEVAKDKAGPSIVICFLVAALSSVLAGLCYAEFGARVPRSGSAYLYSYVTVGELWAFTTGWNLILSYVIGTASVARAWSSAFDNLIGNHISKTLQGSIALHVPHVLAEYPDFFALGLVLLLTGLLALGASESALVTKVFTGVNLLVLGFVMISGFVKGDVHNWKLTEEDYELAMAELNDTYSLGPLGSGGFVPFGFEGILRGAATCFYAFVGFDCIATTGEEAQNPQRSIPMGIVISLSVCFLAYFAVSSALTLMMPYYQLQPESPLPEAFLYIGWAPARYVVAVGSLCALSTSLLGSMFPMPRVIYAMAEDGLLFRVLARIHTGTRTPIIATVVSGIIAAFMAFLFKLTDLVDLMSIGTLLAYSLVSICVLILRYQPDQETKTGEEVELQEEAITTESEKLTLWGLFFPLNSIPTPLSGQIVYVCSSLLAVLLTALCLVLAQWSVPLLSGDLLWTAVVVLLLLLIIGIIVVIWRQPQSSTPLHFKVPALPLLPLMSIFVNIYLMMQMTAGTWARFGVWMLIGFAIYFGYGIQHSLEEIKSNQPSRKSRAKTVDLDPGTLYVHSV

SEQ ID NO: 16551 - protein, 635 aa, Homo Sapiens
MARGLPTIASLARLCQKLNRLKPLEDSTMETSLRRCLSTLDLTLLGVGGMVGSGLYVLTGAVAKEVAGPAVLLSFGVAAVASLLAALCYAEFGARVPRTGSAYLFTYVSMGELWAFLIGWNVLLEYIIGGAAVARAWSGYLDSMFSHSIRNFTETHVGSWQVPLLGHYPDFLAAGIILLASAFVSCGARVSSWLNHTFSAISLLVILFIVILGFILAQPHNWSADEGGFAPFGFSGVMAGTASCFYAFVGFDVIAASSEEAQNPRRSVPLAIAISLAIAAGAYILVSTVLTLMVPWHSLDPDSALADAFYQRGYRWAGFIVAAGSICAMNTVLLSLLFSLPRIVYAMAADGLFFQVFAHVHPRTQVPVAGTLAFGLLTAFLALLLDLESLVQFLSLGTLLAYTFVATSIIVLRFQKSSPPSSPGPASPGPLTKQQSSFSDHLQLVGTVHASVPEPGELKPALRPYLGFLDGYSPGAVVTWALGVMLASAITIGCVLVFGNSTLHLPHWGYILLLLLTSVMFLLSLLVLGAHQQQYREDLFQIPMVPLIPALSIVLNICLMLKLSYLTWVRFSIWLLMGLAVYFGYGIRHSKENQRELPGLNSTHYVVFPRGSLEETVQAMQPPSQAPAQDPGHME

SEQ ID NO: 16552 - protein, 507 aa, Homo Sapiens
MAGAGPKRRALAAPAAEEKEEAREKMLAAKSADGSAPAGEGEGVTLQRNITLLNGVAIIVGTIIGSGIFVTPTGVLKEAGSPGLALVVWAACGVFSIVGALCYAELGTTISKSGGDYAYMLEVYGSLPAFLKLWIELLIIRPSSQYIVALVFATYLLKPLFPTCPVPEEAAKLVACLCVLLLTAVNCYSVKAATRVQDAFAAAKLLALALIILLGFVQIGKGDVSNLDPNFSFEGTKLDVGNIVLALYSGLFAYGGWNYLNFVTEEMINPYRNLPLAIIISLPIVTLVYVLTNLAYFTTLSTEQMLSSEAVAVDFGNYHLGVMSWIIPVFVGLSCFGSVNGSLFTSSRLFFVGSREGHLPSILSMIHPQLLTPVPSLVFTCVMTLLYAFSKDIFSVINFFSFFNWLCVALAIIGMIWLRHRKPELERPIKVNLALPVFFILACLFLIAVSFWKTPVECGIGFTIILSGLPVYFFGVWWKNKPKWLLQGIFSTTVLCQKLMQVVPQET

SEQ ID NO: 16553 - protein, 515 aa, Homo Sapiens
MEAREPGRPTPTYHLVPNTSQSQVEEDVSSPPQRSSETMQLKKEISLLNGVSLVVGNMIGSGIFVSPKGVLVHTASYGMSLIVWAIGGLFSVVGALCYAELGTTITKSGASYAYILEAFGGFIAFIRLWVSLLVVEPTGQAIIAITFANYIIQPSFPSCDPPYLACRLLAAACICLLTFVNCAYVKWGTRVQDTFTYAKVVALIAIIVMGLVKLCQGHSEHFQDAFEGSSWDMGNLSLALYSALFSYSGWDTLNFVTEEIKNPERNLPLAIGISMPIVTLIYILTNVAYYTVLNISDVLSSDAVAVTFADQTFGMFSWTIPIAVALSCFGGLNASIFASSRLFFVGSREGHLPDLLSMIHIERFTPIPALLFNCTMALIYLIVEDVFQLINYFSFSYWFFVGLSVVGQLYLRWKEPKRPRPLKLSVFFPIVFCICSVFLVIVPLFTDTINSLIGIGIALSGVPFYFMGVYLPESRRPLFIRNVLAAITRGTQQLCFCVLTELDVAEEKKDERKTD

SEQ ID NO: 16554 - protein, 511 aa, Homo Sapiens
MVDSTEYEVASQPEVETSPLGDGASPGPEQVKLKKEISLLNGVCLIVGNMIGSGIFVSPKGVLIYSASFGLSLVIWAVGGLFSVFGALCYAELGTTIKKSGASYAYILEAFGGFLAFIRLWTSLLIIEPTSQAIIAITFANYMVQPLFPSCFAPYAASRLLAAACICLLTFINCAYVKWGTLVQDIFTYAKVLALIAVIVAGIVRLGQGASTHFENSFEGSSFAVGDIALALYSALFSYSGWDTLNYVTEEIKNPERNLPLSIGISMPIVTIIYILTNVAYYTVLDMRDILASDAVAVTFADQIFGIFNWIIPLSVALSCFGGLNASIVAASRLFFVGSREGHLPDAICMIHVERFTPVPSLLFNGIMALIYLCVEDIFQLINYYSFSYWFFVGLSIVGQLYLRWKEPDRPRPLKLSVFFPIVFCLCTIFLVAVPLYSDTINSLIGIAIALSGLPFYFLIIRVPEHKRPLYLRRIVGSATRYLQVLCMSVAAEMDLEDGGEMPKQRDPKSN

SEQ ID NO: 16555 - protein, 535 aa, Homo Sapiens
MEEGARHRNNTEKKHPGGGESDASPEAGSGGGGVALKKEIGLVSACGIIVGNIIGSGIFVSPKGVLENAGSVGLALIVWIVTGFITVVGALCYAELGVTIPKSGGDYSYVKDIFGGLAGFLRLWIAVLVIYPTNQAVIALTFSNYVLQPLFPTCFPPESGLRLLAAICLLLLTWVNCSSVRWATRVQDIFTAGKLLALALIIIMGIVQICKGEYFWLEPKNAFENFQEPDIGLVALAFLQGSFAYGGWNFLNYVTEELVDPYKNLPRAIFISIPLVTFVYVFANVAYVTAMSPQELLASNAVAVTFGEKLLGVMAWIMPISVALSTFGGVNGSLFTSSRLFFAGAREGHLPSVLAMIHVKRCTPIPALLFTCISTLLMLVTSDMYTLINYVGFINYLFYGVTVAGQIVLRWKKPDIPRPIKINLLFPIIYLLFWAFLLVFSLWSEPVVCGIGLAIMLTGVPVYFLGVYWQHKPKCFSDFIELLTLVSQKMCVVVYPEVERGSGTEEANEDMEEQQQPMYQPTPTKDKDVAGQPQP

SEQ ID NO: 16556 - protein, 487 aa, Homo Sapiens
MGDTGLRKRREDEKSIQSQEPKTTSLQKELGLISGISIIVGTIIGSGIFVSPKSVLSNTEAVGPCLIIWAACGVLATLGALCFAELGTMITKSGGEYPYLMEAYGPIPAYLFSWASLIVIKPTSFAIICLSFSEYVCAPFYVGCKPPQIVVKCLAAAAILFISTVNSLSVRLGSYVQNIFTAAKLVIVAIIIISGLVLLAQGNTKNFDNSFEGAQLSVGAISLAFYNGLWAYDGWNQLNYITEELRNPYRNLPLAIIIGIPLVTACYILMNVSYFTVMTATELLQSQAVAVTFGDRVLYPASWIVPLFVAFSTIGAANGTCFTAGRLIYVAGREGHMLKVLSYISVRRLTPAPAIIFYGIIATIYIIPGDINSLVNYFSFAAWLFYGLTILGLIVMRFTRKELERPIKVPVVIPVLMTLISVFLVLAPIISKPTWEYLYCVLFILSGLLFYFLFVHYKFGWAQKISKPITMHLQMLMEVVPPEEDPE

SEQ ID NO: 16557 - protein, 523 aa, Homo Sapiens
MAGHTQQPSGRGNPRPAPSPSPVPGTVPGASERVALKKEIGLLSACTIIIGNIIGSGIFISPKGVLEHSGSVGLALFVWVLGGGVTALGSLCYAELGVAIPKSGGDYAYVTEIFGGLAGFLLLWSAVLIMYPTSLAVISMTFSNYVLQPVFPNCIPPTTASRVLSMACLMLLTWVNSSSVRWATRIQDMFTGGKLLALSLIIGVGLLQIFQGHFEELRPSNAFAFWMTPSVGHLALAFLQGSFAFSGWNFLNYVTEEMVDARKNLPRAIFISIPLVTFVYTFTNIAYFTAMSPQELLSSNAVAVTFGEKLLGYFSWVMPVSVALSTFGGINGYLFTYSRLCFSGAREGHLPSLLAMIHVRHCTPIPALLVCCGATAVIMLVGDTYTLINYVSFINYLCYGVTILGLLLLRWRRPALHRPIKVNLLIPVAYLVFWAFLLVFSFISEPMVCGVGVIIILTGVPIFFLGVFWRSKPKCVHRLTESMTHWGQELCFVVYPQDAPEEEENGPCPPSLLPATDKPSKPQ

SEQ ID NO: 16558 - protein, 501 aa, Homo Sapiens
MVRKPVVSTISKGGYLQGNVNGRLPSLGNKEPPGQEKVQLKRKVTLLRGVSIIIGTIIGAGIFISPKGVLQNTGSVGMSLTIWTVCGVLSLFGALSYAELGTTIKKSGGHYTYILEVFGPLPAFVRVWVELLIIRPAATAVISLAFGRYILEPFFIQCEIPELAIKLITAVGITVVMVLNSMSVSWSARIQIFLTFCKLTAILIIIVPGVMQLIKGQTQNFKDAFSGRDSSITRLPLAFYYGMYAYAGWFYLNFVTEEVENPEKTIPLAICISMAIVTIGYVLTNVAYFTTINAEELLLSNAVAVTFSERLLGNFSLAVPIFVALSCFGSMNGGVFAVSRLFYVASREGHLPEILSMIHVRKHTPLPAVIVLHPLTMIMLFSGDLDSLLNFLSFARWLFIGLAVAGLIYLRYKCPDMHRPFKVPLFIPALFSFTCLFMVALSLYSDPFSTGIGFVITLTGVPAYYLFIIWDKKPRWFRIMSEKITRTLQIILEVVPEEDKL

SEQ ID NO: 16559 - protein, 470 aa, Homo Sapiens
MDRGEKIQLKRVFGYWWGTSFLLINIIGAGIFVSPKGVLAYSCMNVGVSLCVWAGCAILAMTSTLCSAEISISFPCSGAQYYFLKRYFGSTVAFLNLWTSLFLGSGVVAGQALLLAEYSIQPFFPSCSVPKLPKKCLALAMLWIVGILTSRGVKEVTWLQIASSVLKVSILSFISLTGVVFLIRGKKENVERFQNAFDAELPDISHLIQAIFQGYFAYSGGACFTLIAGELKKPRTTIPKCIFTALPLVTVVYLLVNISYLTVLTPREILSSDAVAITWADRAFPSLAWIMPFAISTSLFSNLLISIFKSSRPIYLASQEGQLPLLFNTLNSHSSPFTAVLLLVTLGSLAIILTSLIDLINYIFFTGSLWSILLMIGILRRRYQEPNLSIPYKVFLSFPLATIVIDVGLVVIPLVKSPNVHYVYVLLLVLSGLLFYIPLIHFKIRLAWFEKMTCYLQLLFNICLPDVSEE

SEQ ID NO: 16560 - protein, 771 aa, Homo Sapiens
MSGFFTSLDPRRVQWGAAWYAMHSRILRTKPVESMLEGTGTTTAHGTKLAQVLTTVDLISLGVGSCVGTGMYVVSGLVAKEMAGPGVIVSFIIAAVASILSGVCYAEFGVRVPKTTGSAYTYSYVTVGEFVAFFIGWNLILEYLIGTAAGASALSSMFDSLANHTISRWMADSVGTLNGLGKGEESYPDLLALLIAVIVTIIVALGVKNSIGFNNVLNVLNLAVWVFIMIAGLFFINGKYWAEGQFLPHGWSGVLQGAATCFYAFIGFDIIATTGEEAKNPNTSIPYAITASLVICLTAYVSVSVILTLMVPYYTIDTESPLMEMFVAHGFYAAKFVVAIGSVAGLTVSLLGSLFPMPRVIYAMAGDGLLFRFLAHVSSYTETPVVACIVSGFLAALLALLVSLRDLIEMMSIGTLLAYTLVSVCVLLLRYQPESDIDGFVKFLSEEHTKKKEGILADCEKEACSPVSEGDEFSGPATNTCGAKNLPSLGDNEMLIGKSDKSTYNVNHPNYGTVDMTTGIEADESENIYLIKLKKLIGPHYYTMRIRLGLPGKMDRPTAATGHTVTICVLLLFILMFIFCSFIIFGSDYISEQSWWAILLVVLMVLLISTLVFVILQQPENPKKLPYMAPCLPFVPAFAMLVNIYLMLKLSTITWIRFAVWCFVGLLIYFGYGIWNSTLEISAREEALHQSTYQRYDVDDPFSVEEGFSYATEGESQEDWGGPTEDKGFYYQQMSDAKANGRTSSKAKSKSKHKQNSEALIANDELDYSPE

SEQ ID NO: 16561 - protein, 630 aa, Homo Sapiens; identical to SEQ ID NO: 16546

SEQ ID NO: 16562 - protein, 658 aa, Homo Sapiens; identical to SEQ ID NO: 16549

SEQ ID NO: 16563 - protein, 619 aa, Homo Sapiens; identical to SEQ ID NO: 16550

SEQ ID NO: 16564 - protein, 635 aa, Homo Sapiens; identical to SEQ ID NO: 16551

SEQ ID NO: 16565 - protein, 1483 aa, Homo Sapiens
MAPLLGRKPFPLVKPLPGEEPLFTIPHTQEAFRTREEYEARLERYSERIWTCKSTGSSQLTHKEAWEEEQEVAELLKEEFPAWYEKLVLEMVHHNTASLEKLVDTAWLEIMTKYAVGEECDFEVGKEKMLKVKIVKIHPLEKVDEEATEKKSDGACDSPSSDKENSSQIAQDHQKKETVVKEDEGRRESINDRARRSPRKLPTSLKKGERKWAPPKFLPHKYDVKLQNEDKIISNVPADSLIRTERPPNKEIVRYFIRHNALRAGTGENAPWVVEDELVKKYSLPSKFSDFLLDPYKYMTLNPSTKRKNTGSPDRKPSKKSKTDNSSLSSPLNPKLWCHVHLKKSLSGSPLKVKNSKNSKSPEEHLEEMMKMMSPNKLHTNFHIPKKGPPAKKPGKHSDKPLKAKGRSKGILNGQKSTGNSKSPKKGLKTPKTKMKQMTLLDMAKGTQKMTRAPRNSGGTPRTSSKPHKHLPPAALHLIAYYKENKDREDKRSALSCVISKTARLLSSEDRARLPEELRSLVQKRYELLEHKKRWASMSEEQRKEYLKKKREELKKKLKEKAKERREKEMLERLEKQKRYEDQELTGKNLPAFRLVDTPEGLPNTLFGDVAMVVEFLSCYSGLLLPDAQYPITAVSLMEALSADKGGFLYLNRVLVILLQTLLQDEIAEDYGELGMKLSEIPLTLHSVSELVRLCLRRSDVQEESEGSDTDDNKDSAAFEDNEVQDEFLEKLETSEFFELTSEEKLQILTALCHRILMTYSVQDHMETRQQMSAELWKERLAVLKEENDKKRAEKQKRKEMEAKNKENGKVENGLGKTDRKKEIVKFEPQVDTEAEDMISAVKSRRLLAIQAKKEREIQEREMKVKLERQAEEERIRKHKAAAEKAFQEGIAKAKLVMRRTPIGTDRNHNRYWLFSDEVPGLFIEKGWVHDSIDYRFNHHCKDHTVSGDEDYCPRSKKANLGKNASMNTQHGTATEVAVETTTPKQGQNLWFLCDSQKELDELLNCLHPQGIRESQLKERLEKRYQDIIHSIHLARKPNLGLKSCDGNQELLNFLRSDLIEVATRLQKGGLGYVEETSEFEARVISLEKLKDFGECVIALQASVIKKFLQGFMAPKQKRRKLQSEDSAKTEEVDEEKKMVEEAKVASALEKWKTAIREAQTFSRMHVLLGMLDACIKWDMSAENARCKVCRKKGEDDKLILCDECNKAFHLFCLRPALYEVPDGEWQCPACQPATARRNSRGRNYTEESASEDSEDDESDEEEEEEEEEEEEEDYEVAGLRLRPRKTIRGKHSVIPPAARSGRRPGKKPHSTRRSQPKAPPVDDAEVDELVLQTKRSSRRQSLELQKCEEILHKIVKYRFSWPFREPVTRDEAEDYYDVITHPMDFQTVQNKCSCGSYRSVQEFLTDMKQVFTNAEVYNCRGSHVLSCMVKTEQCLVALLHKHLPGHPYVRRKRKKFPDRLAEDEGDSEPEAVGQSRGRRQKK

SEQ ID NO: 16566 - protein, 530 aa, Homo Sapiens
MTRDFKPGDLIFAKMKGYPHWPARVDEVPDGAVKPPTNKLPIFFFGTHETAFLGPKDIFPYSENKEKYGKPNKRKGFNEGLWEIDNNPKVKFSSQQAATKQSNASSDVEVEEKETSVSKEDTDHEEKASNEDVTKAVDITTPKAARRGRKRKAEKQVETEEAGVVTTATASVNLKVSPKRGRPAATEVKIPKPRGRPKMVKQPCPSESDIITEEDKSKKKGQEEKQPKKQPKKDEEGQKEEDKPRKEPDKKEGKKEVESKRKNLAKTGVTSTSDSEEEGDDQEGEKKRKGGRNFQTAHRRNMLKGQHEKEAADRKRKQEEQMETEQQNKDEGKKPEVKKVEKKRETSMDSRLQRIHAEIKNSLKIDNLDVNRCIEALDELASLQVTMQQAQKHTEMITTLKKIRRFKVSQVIMEKSTMLYNKFKNMFLVGEGDSVITQVLNKSLAEQRQHEEANKTKDQGKKGPNKKLEKEQTGSKTLNGGSDAQDGNQPQHNGESNEDSKDNHEASTKKKPSSEERETEISLKDSTLDN

SEQ ID NO: 16567 - protein, 228 aa, Homo Sapiens
MSVSEIFVELQGFLAAEQDIREEIRKVVQSLEQTAREILTLLQGVHQGAGFQDIPKRCLKAREHFGTVKTHLTSLKTKFPAEQYYRFHEHWRFVLQRLVFLAAFVVYLETETLVTREAVTEILGIEPDREKGFHLDVEDYLSGVLILASELSRLSVNSVTAGDYSRPLHISTFINELDSGFRLLNLKNDSLRKRYDGLKYDVKKVEEVVYDLSIRGFNKETAAACVEK

SEQ ID NO: 16568 - protein, 140 aa, Homo Sapiens; identical to SEQ ID NO: 14672

SEQ ID NO: 16569 - protein, 176 aa, Homo Sapiens; identical to SEQ ID NO: 14673

SEQ ID NO: 16570 - protein, 164 aa, Homo Sapiens; identical to SEQ ID NO: 14674

SEQ ID NO: 16571 - protein, 207 aa, Homo Sapiens; identical to SEQ ID NO: 14675

SEQ ID NO: 16572 - protein, 182 aa, Homo Sapiens; identical to SEQ ID NO: 14676

SEQ ID NO: 16573 - protein, 171 aa, Homo Sapiens; identical to SEQ ID NO: 2330

SEQ ID NO: 16574 - protein, 552 aa, Homo Sapiens
MAEKQKHDGRVKIGHYVLGDTLGVGTFGKVKIGEHQLTGHKVAVKILNRQKIRSLDVVGKIKREIQNLKLFRHPHIIKLYQVISTPTDFFMVMEYVSGGELFDYICKHGRVEEMEARRLFQQILSAVDYCHRHMVVHRDLKPENVLLDAHMNAKIADFGLSNMMSDGEFLRTSCGSPNYAAPEVISGRLYAGPEVDIWSCGVILYALLCGTLPFDDEHVPTLFKKIRGGVFYIPEYLNRSVATLLMHMLQVDPLKRATIKDIREHEWFKQDLPSYLFPEDPSYDANVIDDEAVKEVCEKFECTESEVMNSLYSGDPQDQLAVAYHLIIDNRRIMNQASEFYLASSPPSGSFMDDSAMHIPPGLKPHPERMPPLIADSPKARCPLDALNTTKPKSLAVKKAKWHLGIRSQSKPYDIMAEVYRAMKQLDFEWKVVNAYHLRVRRKNPVTGNYVKMSLQLYLVDNRSYLLDFKSIDDEVVEQRSGSSTPQRSCSAAGLHRPRSSFDSTTAESHSLSGSLTGSLTGSTLSSVSPRLGSHTMDFFEMCASLITTLAR

SEQ ID NO: 16575 - protein, 270 aa, Homo Sapiens
MGNTSSERAALERHGGHKTPRRDSSGGTKDGDRPKILMDSPEDADLFHSEEIKAPEKEEFLAWQHDLEVNDKAPAQARPTVFRWTGGGKEVYLSGSFNNWSKLPLTRSHNNFVAILDLPEGEHQYKFFVDGQWTHDPSEPIVTSQLGTVNNIIQVKKTDFEVFDALMVDSQKCSDVSELSSSPPGPYHQEPYVCKPEERFRAPPILPPHLLQVILNKDTGISCDPALLPEPNHVMLNHLYALSIKDGVMVLSATHRYKKKYVTTLLYKPI

SEQ ID NO: 16576 - protein, 595 aa, Homo Sapiens
MPACCSCSDVFQYETNKVTRIQSMNYGTIKWFFHVIIFSYVCFALVSDKLYQRKEPVISSVHTKVKGIAEVKEEIVENGVKKLVHSVFDTADYTFPLQGNSFFVMTNFLKTEGQEQRLCPEYPTRRTLCSSDRGCKKGWMDPQSKGIQTGRCVVYEGNQKTCEVSAWCPIEAVEEAPRPALLNSAENFTVLIKNNIDFPGHNYTTRNILPGLNITCTFHKTQNPQCPIFRLGDIFRETGDNFSDVAIQGGIMGIEIYWDCNLDRWFHHCRPKYSFRRLDDKTTNVSLYPGYNFRYAKYYKENNVEKRTLIKVFGIRFDILVFGTGGKFDIIQLVVYIGSTLSYFGLAAVFIDFLIDTYSSNCCRSHIYPWCKCCQPCVVNEYYYRKKCESIVEPKPTLKYVSFVDESHIRMVNQQLLGRSLQDVKGQEVPRPAMDFTDLSRLPLALHDTPPIPGQPEEIQLLRKEATPRSRDSPVWCQCGSCLPSQLPESHRCLEELCCRKKPGACITTSELFRKLVLSRHVLQFLLLYQEPLLALDVDSTNSRLRHCAYRCYATWRFGSQDMADFAILPSCCRWRIRKEFPKSEGQYSGFKSPY

SEQ ID NO: 16577 - protein, 1465 aa, Homo Sapiens
MPEQERQITAREGASRKILSKLSLPTRAWEPAMKKSFAFDNVGYEGGLDGLGPSSQVATSTVRILGMTCQSCVKSIEDRISNLKGIISMKVSLEQGSATVKYVPSVVCLQQVCHQIGDMGFEASIAEGKAASWPSRSLPAQEAVVKLRVEGMTCQSCVSSIEGKVRKLQGVVRVKVSLSNQEAVITYQPYLIQPEDLRDHVNDMGFEAAIKSKVAPLSLGPIDIERLQSTNPKRPLSSANQNFNNSETLGHQGSHVVTLQLRIDGMHCKSCVLNIEENIGQLLGVQSIQVSLENKTAQVKYDPSCTSPVALQRAIEALPPGNFKVSLPDGAEGSGTDHRSSSSHSPGSPPRNQVQGTCSTTLIAIAGMTCASCVHSIEGMISQLEGVQQISVSLAEGTATVLYNPSVISPEELRAAIEDMGFEASVVSESCSTNPLGNHSAGNSMVQTTDGTPTSVQEVAPHTGRLPANHAPDILAKSPQSTRAVAPQKCFLQIKGMTCASCVSNIERNLQKEAGVLSVLVALMAGKAEIKYDPEVIQPLEIAQFIQDLGFEAAVMEDYAGSDGNIELTITGMTCASCVHNIESKLTRTNGITYASVALATSKALVKFDPEIIGPRDIIKIIEEIGFHASLAQRNPNAHHLDHKMEIKQWKKSFLCSLVFGIPVMALMIYMLIPSNEPHQSMVLDHNIIPGLSILNLIFFILCTFVQLLGGWYFYVQAYKSLRHRSANMDVLIVLATSIAYVYSLVILVVAVAEKAERSPVTFFDTPPMLFVFIALGRWLEHLAKSKTSEALAKLMSLQATEATVVTLGEDNLIIREEQVPMELVQRGDIVKVVPGGKFPVDGKVLEGNTMADESLITGEAMPVTKKPGSTVIAGSINAHGSVLIKATHVGNDTTLAQIVKLVEEAQMSKAPIQQLADRFSGYFVPFIIIMSTLTLVVWIVIGFIDFGVVQRYFPNPNKHISQTEVIIRFAFQTSITVLCIACPCSLGLATPTAVMVGTGVAAQNGILIKGGKPLEMAHKIKTVMFDKTGTITHGVPRVMRVLLLGDVATLPLRKVLAVVGTAEASSEHPLGVAVTKYCKEELGTETLGYCTDFQAVPGCGIGCKVSNVEGILAHSERPLSAPASHLNEAGSLPAEKDAVPQTFSVLIGNREWLRRNGLTISSDVSDAMTDHEMKGQTAILVAIDGVLCGMIAIADAVKQEAALAVHTLQSMGVDVVLITGDNRKTARAIATQVGINKVFAEVLPSHKVAKVQELQNKGKKVAMVGDGVNDSPALAQADMGVAIGTGTDVAIEAADVVLIRNDLLDVVASIHLSKRTVRRIRINLVLALIYNLVGIPIAAGVFMPIGIVLQPWMGSAAMAASSVSVVLSSLQLKCYKKPDLERYEAQAHGHMKPLTASQVSVHIGMDDRWRDSPRATPWDQVSYVSQVSLSSLTSDKPSRHSAAADDDGDKWSLLLNGRDEEQYI

SEQ ID NO: 16578 - protein, 1271 aa, Homo Sapiens
MVDPVGFAEAWKAQFPDSEPPRMELRSVGDIEQELERCKASIRRLEQEVNQERFRMIYLQTLLAKEKKSYDRQRWGFRRAAQAPDGASEPRASASRPQPAPADGADPPPAEEPEARPDGEGSPGKARPGTARRPGAAASGERDDRGPPASVAALRSNFERIRKGHGQPGADAEKPFYVNVEFHHERGLVKVNDKEVSDRISSLGSQAMQMERKKSQHGAGSSVGDASRPPYRGRSSESSCGVDGDYEDAELNPRFLKDNLIDANGGSRPPWPPLEYQPYQSIYVGGMMEGEGKGPLLRSQSTSEQEKRLTWPRRSYSPRSFEDCGGGYTPDCSSNENLTSSEEDFSSGQSSRVSPSPTTYRMFRDKSRSPSQNSQQSFDSSSPPTPQCHKRHRHCPVVVSEATIVGVRKTGQIWPNDGEGAFHGDADGSFGTPPGYGCAADRAEEQRRHQDGLPYIDDSPSSSPHLSSKGRGSRDALVSGALESTKASELDLEKGLEMRKWVLSGILASEETYLSHLEALLLPMKPLKAAATTSQPVLTSQQIETIFFKVPELYEIHKEFYDGLFPRVQQWSHQQRVGDLFQKLASQLGVYRAFVDNYGVAMEMAEKCCQANAQFAEISENLRARSNKDAKDPTTKNSLETLLYKPVDRVTRSTLVLHDLLKHTPASHPDHPLLQDALRISQNFLSSINEEITPRRQSMTVKKGEHRQLLKDSFMVELVEGARKLRHVFLFTDLLLCTKLKKQSGGKTQQYDCKWYIPLTDLSFQMVDELEAVPNIPLVPDEELDALKIKISQIKNDIQREKRANKGSKATERLKKKLSEQESLLLLMSPSMAFRVHSRNGKSYTFLISSDYERAEWRENIREQQKKCFRSFSLTSVELQMLTNSCVKLQTVHSIPLTINKEDDESPGLYGFLNVIVHSATGFKQSSNLYCTLEVDSFGYFVNKAKTRVYRDTAEPNWNEEFEIELEGSQTLRILCYEKCYNKTKIPKEDGESTDRLMGKGQVQLDPQALQDRDWQRTVIAMNGIEVKLSVKFNSREFSLKRMPSRKQTGVFGVKIAVVTKRERSKVPYIVRQCVEEIERRGMEEVGIYRVSGVATDIQALKAAFDVNNKDVSVMMSEMDVNAIAGTLKLYFRELPEPLFTDEFYPNFAEGIALSDPVAKESCMLNLLLSLPEANLLTFLFLLDHLKRVAEKEAVNKMSLHNLATVFGPTLLRPSEKESKLPANPSQPITMTDSWSLEVMSQVQVLLYFLQLEAIPAPDSKRQSILFSTEV

SEQ ID NO: 16579 - protein, 1130 aa, Homo Sapiens
MLEICLKLVGCKSKKGLSSSSSCYLEEALQRPVASDFEPQGLSEAARWNSKENLLAGPSENDPNLFVALYDFVASGDNTLSITKGEKLRVLGYNHNGEWCEAQTKNGQGWVPSNYITPVNSLEKHSWYHGPVSRNAAEYLLSSGINGSFLVRESESSPGQRSISLRYEGRVYHYRINTASDGKLYVSSESRFNTLAELVHHHSTVADGLITTLHYPAPKRNKPTVYGVSPNYDKWEMERTDITMKHKLGGGQYGEVYEGVWKKYSLTVAVKTLKEDTMEVEEFLKEAAVMKEIKHPNLVQLLGVCTREPPFYIITEFMTYGNLLDYLRECNRQEVNAVVLLYMATQISSAMEYLEKKNFIHRDLAARNCLVGENHLVKVADFGLSRLMTGDTYTAHAGAKFPIKWTAPESLAYNKFSIKSDVWAFGVLLWEIATYGMSPYPGIDLSQVYELLEKDYRMERPEGCPEKVYELMRACWQWNPSDRPSFAEIHQAFETMFQESSISDEVEKELGKQGVRGAVSTLLQAPELPTKTRTSRRAAEHRDTTDVPEMPHSKGQGESDPLDHEPAVSPLLPRKERGPPEGGLNEDERLLPKDKKTNLFSALIKKKKKTAPTPPKRSSSFREMDGQPERRGAGEEEGRDISNGALAFTPLDTADPAKSPKPSNGAGVPNGALRESGGSGFRSPHLWKKSSTLTSSRLATGEEEGGGSSSKRFLRSCSASCVPHGAKDTEWRSVTLPRDLQSTGRQFDSSTFGGHKSEKPALPRKRAGENRSDQVTRGTVTPPPRLVKKNEEAADEVFKDIMESSPGSSPPNLTPKPLRRQVTVAPASGLPHKEEAGKGSALGTPAAAEPVTPTSKAGSGAPGGTSKGPAEESRVRRHKHSSESPGRDKGKLSRLKPAPPPPPAASAGKAGGKPSQSPSQEAAGEAVLGAKTKATSLVDAVNSDAAKPSQPGEGLKKPVLPATPKPQSAKPSGTPISPAPVPSTLPSASSALAGDQPSSTAFIPLISTRVSLRKTRQPPERIASGAITKGVVLDSTEALCLAISRNSEQMASHSAVLEAGKNLYTFCVSYVDSIQQMRNKFAFREAINKLENNLRELQICPATAGSGPAATQDFSKLLSSVKEISDIVQR

SEQ ID NO: 16580 - protein, 655 aa, Homo Sapiens
MSSSNVEVFIPVSQGNTNGFPATASNDLKAFTEGAVLSFHNICYRVKLKSGFLPCRKPVEKEILSNINGIMKPGLNAILGPTGGGKSSLLDVLAARKDPSGLSGDVLINGAPRPANFKCNSGYVVQDDVVMGTLTVRENLQFSAALRLATTMTNHEKNERINRVIQELGLDKVADSKVGTQFIRGVSGGERKRTSIGMELITDPSILFLDEPTTGLDSSTANAVLLLLKRMSKQGRTIIFSIHQPRYSIFKLFDSLTLLASGRLMFHGPAQEALGYFESAGYHCEAYNNPADFFLDIINGDSTAVALNREEDFKATEIIEPSKQDKPLIEKLAEIYVNSSFYKETKAELHQLSGGEKKKKITVFKEISYTTSFCHQLRWVSKRSFKNLLGNPQASIAQIIVTVVLGLVIGAIYFGLKNDSTGIQNRAGVLFFLTTNQCFSSVSAVELFVVEKKLFIHEYISGYYRVSSYFLGKLLSDLLPMRMLPSIIFTCIVYFMLGLKPKADAFFVMMFTLMMVAYSASSMALAIAAGQSVVSVATLLMTICFVFMMIFSGLLVNLTTIASWLSWLQYFSIPRYGFTALQHNEFLGQNFCPGLNATGNNPCNYATCTGEEYLVKQGIDLSPWGLWKNHVALACMIVIFLTIAYLKLLFLKKYS

SEQ ID NO: 16581 - protein, 1863 aa, Homo Sapiens; identical to SEQ ID NO: 14811

SEQ ID NO: 16582 - protein, 3418 aa, Homo Sapiens
MPIGSKERPTFFEIFKTRCNKADLGPISLNWFEELSSEAPPYNSEPAEESEHKNNNYEPNLFKTPQRKPSYNQLASTPIIFKEQGLTLPLYQSPVKELDKFKLDLGRNVPNSRHKSLRTVKTKMDQADDVSCPLLNSCLSESPVVLQCTHVTPQRDKSVVCGSLFHTPKFVKGRQTPKHISESLGAEVDPDMSWSSSLATPPTLSSTVLIVRNEEASETVFPHDTTANVKSYFSNHDESLKKNDRFIASVTDSENTNQREAASHGFGKTSGNSFKVNSCKDHIGKSMPNVLEDEVYETVVDTSEEDSFSLCFSKCRTKNLQKVRTSKTRKKIFHEANADECEKSKNQVKEKYSFVSEVEPNDTDPLDSNVANQKPFESGSDKISKEVVPSLACEWSQLTLSGLNGAQMEKIPLLHISSCDQNISEKDLLDTENKRKKDFLTSENSLPRISSLPKSEKPLNEETVVNKRDEEQHLESHTDCILAVKQAISGTSPVASSFQGIKKSIFRIRESPKETFNASFSGHMTDPNFKKETEASESGLEIHTVCSQKEDSLCPNLIDNGSWPATTTQNSVALKNAGLISTLKKKTNKFIYAIHDETSYKGKKIPKDQKSELINCSAQFEANAFEAPLTFANADSGLLHSSVKRSCSQNDSEEPTLSLTSSFGTILRKCSRNETCSNNTVISQDLDYKEAKCNKEKLQLFITPEADSLSCLQEGQCENDPKSKKVSDIKEEVLAAACHPVQHSKVEYSDTDFQSQKSLLYDHENASTLILTPTSKDVLSNLVMISRGKESYKMSDKLKGNNYESDVELTKNIPMEKNQDVCALNENYKNVELLPPEKYMRVASPSRKVQFNQNTNLRVIQKNQEETTSISKITVNPDSEELFSDNENNFVFQVANERNNLALGNTKELHETDLTCVNEPIFKNSTMVLYGDTGDKQATQVSIKKDLVYVLAEENKNSVKQHIKMTLGQDLKSDISLNIDKIPEKNNDYMNKWAGLLGPISNHSFGGSFRTASNKEIKLSEHNIKKSKMFFKDIEEQYPTSLACVEIVNTLALDNQKKLSKPQSINTVSAHLQSSVVVSDCKNSHITPQMLFSKQDFNSNHNLTPSQKAEITELSTILEESGSQFEFTQFRKPSYILQKSTFEVPENQMTILKTTSEECRDADLHVIMNAPSIGQVDSSKQFEGTVEIKRKFAGLLKNDCNKSASGYLTDENEVGFRGFYSAHGTKLNVSTEALQKAVKLFSDIENISEETSAEVHPISLSSSKCHDSVVSMFKIENHNDKTVSEKNNKCQLILQNNIEMTTGTFVEEITENYKRNTENEDNKYTAASRNSHNLEFDGSDSSKNDTVCIHKDETDLLFTDQHNICLKLSGQFMKEGNTQIKEDLSDLTFLEVAKAQEACHGNTSNKEQLTATKTEQNIKDFETSDTFFQTASGKNISVAKESFNKIVNFFDQKPEELHNFSLNSELHSDIRKNKMDILSYEETDIVKHKILKESVPVGTGNQLVTFQGQPERDEKIKEPTLLGFHTASGKKVKIAKESLDKVKNLFDEKEQGTSEITSFSHQWAKTLKYREACKDLELACETIEITAAPKCKEMQNSLNNDKNLVSIETVVPPKLLSDNLCRQTENLKTSKSIFLKVKVHENVEKETAKSPATCYTNQSPYSVIENSALAFYTSCSRKTSVSQTSLLEAKKWLREGIFDGQPERINTADYVGNYLYENNSNSTIAENDKNHLSEKQDTYLSNSSMSNSYSYHSDEVYNDSGYLSKNKLDSGIEPVLKNVEDQKNTSFSKVISNVKDANAYPQTVNEDICVEELVTSSSPCKNKNAAIKLSISNSNNFEVGPPAFRIASGKIVCVSHETIKKVKDIFTDSFSKVIKENNENKSKICQTKIMAGCYEALDDSEDILHNSLDNDECSTHSHKVFADIQSEEILQHNQNMSGLEKVSKISPCDVSLETSDICKCSIGKLHKSVSSANTCGIFSTASGKSVQVSDASLQNARQVFSEIEDSTKQVFSKVLFKSNEHSDQLTREENTAIRTPEHLISQKGFSYNVVNSSAFSGFSTASGKQVSILESSLHKVKGVLEEFDLIRTEHSLHYSPTSRQNVSKILPRVDKRNPEHCVNSEMEKTCSKEFKLSNNLNVEGGSSENNHSIKVSPYLSQFQQDKQQLVLGTKVSLVENIHVLGKEQASPKNVKMEIGKTETFSDVPVKTNIEVCSTYSKDSENYFETEAVEIAKAFMEDDELTDSKLPSHATHSLFTCPENEEMVLSNSRIGKRRGEPLILVGEPSIKRNLLNEFDRIIENQEKSLKASKSTPDGTIKDRRLFMHHVSLEPITCVPFRTTKERQEIQNPNFTAPGQEFLSKSHLYEHLTLEKSSSNLAVSGHPFYQVSATRNEKMRHLITTGRPTKVFVPPFKTKSHFHRVEQCVRNINLEENRQKQNIDGHGSDDSKNKINDNEIHQFNKNNSNQAAAVTFTKCEEEPLDLITSLQNARDIQDMRIKKKQRQRVFPQPGSLYLAKTSTLPRISLKAAVGGQVPSACSHKQLYTYGVSKHCIKINSKNAESFQFHTEDYFGKESLWTGKGIQLADGGWLIPSNDGKAGKEEFYRALCDTPGVDPKLISRIWVYNHYRWIIWKLAAMECAFPKEFANRCLSPERVLLQLKYRYDTEIDRSRRSAIKKIMERDDTAAKTLVLCVSDIISLSANISETSSNKTSSADTQKVAIIELTDGWYAVKAQLDPPLLAVLKNGRLTVGQKIILHGAELVGSPDACTPLEAPESLMLKISANSTRPARWYTKLGFFPDPRPFPLPLSSLFSDGGNVGCVDVIIQRAYPIQWMEKTSSGLYIFRNEREEEKEAAKYVEAQQKRLEALFTKIQEEFEEHEENTTKPYLPSRALTRQQVRALQDGAELYEAVKNAADPAYLEGYFSEEQLRALNNHRQMLNDKKQAQIQLEIRKAMESAEQKEQGLSRDVTTVWKLRIVSYSKKEKDSVILSIWRPSSDLYSLLTEGKRYRIYHLATSKSKSKSERANIQLAATKKTQYQQLPVSDEILFQIYQPREPLHFSKFLDPDFQPSCSEVDLIGFVVSVVKKTGLAPFVYLSDECYNLLAIKFWIDLNEDIIKPHMLIAASNLQWRPESKSGLLTLFAGDFSVFSASPKEGHFQETFNKMKNTVENIDILCNEAENKLMHILHANDPKWSTPTKDCTSGPYTAQIIPGTGNKLLMSSPNCEIYYQSPLSLCMAKRKSVSTPVSAQMTSKSCKGEKEIDDQKNCKKRRALDFLSRLPLPPPVSPICTFVSPAAQKAFQPPRSCGTKYETPIKKKELNSPQMTPFKKFNEISLLESNSIADEELALINTQALLSGSTGEKQFISVSESTRTAPTSSEDYLRLKRRCTTSLIKEQESSQASTEECEKNKQDTITTKKYI

SEQ ID NO: 16583 - protein, 61 aa, Homo Sapiens
MKRFLFLLLTISLLVMVQIQTGLSGQNDTSQTSSPSASSNISGGIFLFFVANAIIHLFCFS

SEQ ID NO: 16584 - protein, 497 aa, Homo Sapiens [sequence omitted]

SEQ ID NO: 16585 - protein, 260 aa, Homo Sapiens [sequence omitted]

SEQ ID NO: 16586 - protein, 187 aa, Homo Sapiens
MVGSLNCIVAVSQNMGIGKNGDLPWPPLRNEFRYFQRMTTTSSVEGKQNLVIMGKKTWFSIPEKNRPLKGRINLVLSRELKEPPQGAHFLSRSLDDALKLTEQPELANKVDMVWIVGGSSVYKEAMNHPGHLKLFVTRIMQDFESDTFFPEIDLEKYKLLPEYPGVLSDVQEEKGIKYKFEVYEKND

SEQ ID NO: 16587 - protein, 1025 aa, Homo Sapiens
MAPVLSKDSADIESILALNPRTQTHATLCSTSAKKLDKKHWKRNPDKNCFNCEKLENNFDDIKHTTLGERGALREAMRCLKCADAPCQKSCPTNLDIKSFITSIANKNYYGAAKMIFSDNPLGLTCGMVCPTSDLCVGGCNLYATEEGPINIGGLQQFATEVFKAMSIPQIRNPSLPPPEKMSEAYSAKIALFGAGPASISCASFLARLGYSDITIFEKQEYVGGLSTSEIPQFRLPYDVVNFEIELMKDLGVKIICGKSLSVNEMTLSTLKEKGYKAAFIGIGLPEPNKDAIFQGLTQDQGFYTSKDFLPLVAKGSKAGMCACHSPLPSIRGVVIVLGAGDTAFDCATSALRCGARRVFIVFRKGFVNIRAVPEEMELAKEEKCEFLPFLSPRKVIVKGGRIVAMQFVRTEQDETGKWNEDEDQMVHLKADVVISAFGSVLSDPKVKEALSPIKFNRWGLPEVDPETMQTSEAWVFAGGDVVGLANTTVESVNDGKQASWYIHKYVQSQYGASVSAKPELPLFYTPIDLVDISVEMAGLKFINPFGLASATPATSTSMIRRAFEAGWGFALTKTFSLDKDIVTNVSPRIIRGTTSGPMYGPGQSSFLNIELISEKTAAYWCQSVTELKADFPDNIVIASIMCSYNKNDWTELAKKSEDSGADALELNLSCPHGMGERGMGLACGQDPELVRNICRWVRQAVQIPFFAKLTPNVTDIVSIARAAKEGGANGVTATNTVSGLMGLKSDGTPWPAVGIAKRTTYGGVSGTAIRPIALRAVTSIARALPGFPILATGGIDSAESGLQFLHSGASVLQVCSAIQNQDFTVIEDYCTGLKALLYLKSIEELQDWDGQSPATVSHQKGKPVPRIAELMDKKLPSFGPYLEQRKKIIAENKIRLKEQNVAFSPLKRNCFIPKRPIPTIKDVIGKALQYLGTFGELSNVEQVVAMIDEEMCINCGKCYMTCNDSGYQAIQFDPETHLPTITDTCTGCTLCLSVCPIVDCIKMVSRTTPYEPKRGVPLSVNPVC

SEQ ID NO: 16588 - protein, 1210 aa, Homo Sapiens [sequence omitted]

SEQ ID NO: 16589 - protein, 297 aa, Homo Sapiens
MDPGKDKEGVPQPSGPPARKKFVIPLDEDEVPPGVAKPLFRSTQSLPTVDTSAQAAPQTYAEYAISQPLEGAGATCPTGSEPLAGETPNQALKPGAKSNSIIVSPRQRGNPVLKFVRNVPWEFGDVIPDYVLGQSTCALFLSLRYHNLHPDYIHGRLQSLGKNFALRVLLVQVDVKDPQQALKELAKMCILADCTLILAWSPEEAGRYLETYKAYEQKPADLLMEKLEQDFVSRVTECLTTVKSVNKTDSQTLLTTFGSLEQLIAASREDLALCPGLGPQKARRLFDVLHEPFLKVP

SEQ ID NO: 16590 - protein, 595 aa, Homo Sapiens [sequence omitted]

SEQ ID NO: 16591 - protein, 254 aa, Homo Sapiens; identical to SEQ ID NO: 5200

SEQ ID NO: 16592 - protein, 1255 aa, Homo Sapiens [sequence omitted]

SEQ ID NO: 16593 - protein, 1367 aa, Homo Sapiens
MKSGSGGGSPTSLWGLLFLSAALSLWPTSGEICGPGIDIRNDYQQLKRLENCTVIEGYLHILLISKAEDYRSYRFPKLTVITEYLLLFRVAGLESLGDLFPNLTVIRGWKLFYNYALVIFEMTNLKDIGLYNLRNITRGAIRIEKNADLCYLSTVDWSLILDAVSNNYIVGNKPPKECGDLCPGTMEEKPMCEKTTINNEYNYRCWTTNRCQKMCPSTCGKRACTENNECCHPECLGSCSAPDNDTACVACRHYYYAGVCVPACPPNTYRFEGWRCVDRDFCANILSAESSDSEGFVIHDGECMQECPSGFIRNGSQSMYCIPCEGPCPKVCEEEKKTKTIDSVTSAQMLQGCTIFKGNLLINIRRGNNIASELENFMGLIEVVTGYVKIRHSHALVSLSFLKNLRLILGEEQLEGNYSFYVLDNQNLQQLWDWDHRNLTIKAGKMYFAFNPKLCVSEIYRMEEVTGTKGRQSKGDINTRNNGERASCESDVLHFTSTTTSKNRIIITWHRYRPPDYRDLISFTVYYKEAPFKNVTEYDGQDACGSNSWNMVDVDLPPNKDVEPGILLHGLKPWTQYAVYVKAVTLTMVENDHIRGAKSEILYIRTNASVPSIPLDVLSASNSSSQLIVKWNPPSLPNGNLSYYIVRWQRQPQDGYLYRHNYCSKDKIPIRKYADGTIDIEEVTENPKTEVCGGEKGPCCACPKTEAEKQAEKEEAEYRKVFENFLHNSIFVPRPERKRRDVMQVANTTMSSRSRNTTAADTYNITDPEELETEYPFFESRVDNKERTVISNLRPFTLYRIDIHSCNHEAEKLGCSASNFVFARTMPAEGADDIPGPVTWEPRPENSIFLKWPEPENPNGLILMYEIKYGSQVEDQRECVSRQEYRKYGGAKLNRLNPGNYTARIQATSLSGNGSWTDPVFFYVQAKTGYENFIHLIIALPVAVLLIVGGLVIMLYVFHRKRNNSRLGNGVLYASVNPEYFSAADVYVPDEWEVAREKITMSRELGQGSFGMVYEGVAKGVVKDEPETRVAIKTVNEAASMRERIEFLNEASVMKEFNCHHVVRLLGVVSQGQPTLVIMELMTRGDLKSYLRSLRPEMENNPVLAPPSLSKMIQMAGEIADGMAYLNANKFVHRDLAARNCMVAEDFTVKIGDFGMTRDIYETDYYRKGGKGLLPVRWMSPESLKDGVFTTYSDVWSFGVVLWEIATLAEQPYQGLSNEQVLRFVMEGGLLDKPDNCPDMLFELMRMCWQYNPKMRPSFLEIISSIKEEMEPGFREVSFYYSEENKLPEPEELDLEPENMESVPLDPSASSSSLPLPDRHSGHKAENGPGPGVLVLRASFDERQPYAHMNGGRKNERALPLPQSSTC

SEQ ID NO: 16594 - protein, 189 aa, Homo Sapiens [sequence omitted]

SEQ ID NO: 16595 - protein, 1280 aa, Homo Sapiens
MDLEGDRNGGAKKKNFFKLNNKSEKDKKEKKPTVSVFSMFRYSNWLDKLYMVVGTLAAIIHGAGLPLMMLVFGEMTDIFANAGNLEDLMSNITNRSDINDTGFFMNLEEDMTRYAYYYSGIGAGVLVAAYIQVSFWCLAAGRQIHKIRKQFFHAIMRQEIGWFDVHDVGELNTRLTDDVSKINEGIGDKIGMFFQSMATFFTGFIVGFTRGWKLTLVILAISPVLGLSAAVWAKILSSFTDKELLAYAKAGAVAEEVLAAIRTVIAFGGQKKELERYNKNLEEAKRIGIKKAITANISIGAAFLLIYASYALAFWYGTTLVLSGEYSIGQVLTVFFSVLIGAFSVGQASPSIEAFANARGAAYEIFKIIDNKPSIDSYSKSGHKPDNIKGNLEFRNVHFSYPSRKEVKILKGLNLKVQSGQTVALVGNSGCGKSTTVQLMQRLYDPTEGMVSVDGQDIRTINVRFLREIIGVVSQEPVLFATTIAENIRYGRENVTMDEIEKAVKEANAYDFIMKLPHKFDTLVGERGAQLSGGQKQRIAIARALVRNPKILLLDEATSALDTESEAVVQVALDKARKGRTTIVIAHRLSTVRNADVIAGFDDGVIVEKGNHDELMKEKGIYFKLVTMQTAGNEVELENAADESKSEIDALEMSSNDSRSSLIRKRSTRRSVRGSQAQDRKLSTKEALDESIPPVSFWRIMKLNLTEWPYFVVGVFCAIINGGLQPAFAIIFSKIIGVFTRIDDPETKRQNSNLFSLLFLALGIISFITFFLQGFTFGKAGEILTKRLRYMVFRSMLRQDVSWFDDPKNTTGALTTRLANDAAQVKGAIGSRLAVITQNIANLGTGIIISFIYGWQLTLLLLAIVPIIAIAGVVEMKMLSGQALKDKKELEGSGKIATEAIENFRTVVSLTQEQKFEHMYAQSLQVPYRNSLRKAHIFGITFSFTQAMMYFSYAGCFRFGAYLVAHKLMSFEDVLLVFSAVVFGAMAVGQVSSFAPDYAKAKISAAHIIMIIEKTPLIDSYSTEGLMPNTLEGNVTFGEVVFNYPTRPDIPVLQGLSLEVKKGQTLALVGSSGCGKSTVVQLLERFYDPLAGKVLLDGKEIKRLNVQWLRAHLGIVSQEPILFDCSIAENIAYGDNSRVVSQEEIVRAAKEANIHAFIESLPNKYSTKVGDKGTQLSGGQKQRIAIARALVRQPHILLLDEATSALDTESEKVVQEALDKAREGRTCIVIAHRLSTIQNADLIVVFQNGRVKEHGTHQQLLAQKGIYFSMVSVQAGTKRQ

SEQ ID NO: 16596 - protein, 207 aa, Homo Sapiens
MDKDCEMKRTTLDSPLGKLELSGCEQGLHEIKLLGKGTSAADAVEVPAPAAVLGGPEPLMQCTAWLNAYFHQPEAIEEFPVPALHHPVFQQESFTRQVLWKLLKVVKFGEVISYQQLAALAGNPKAARAVGGAMRGNPVPILIPCHRVVCSSGAVGNYSGGLAVKEWLLAHEGHRLGKPGLGGSSGLAGAWLKGAGATSGSPPAGRN

SEQ ID NO: 16597 - protein, 1531 aa, Homo Sapiens
MALRGFCSADGSDPLWDWNVTWNTSNPDFTKCFQNTVLVWVPCFYLWACFPFYFLYLSRHDRGYIQMTPLNKTKTALGFLLWIVCWADLFYSFWERSRGIFLAPVFLVSPTLLGITMLLATFLIQLERRKGVQSSGIMLTFWLVALVCALAILRSKIMTALKEDAQVDLFRDITFYVYFSLLLIQLVLSCFSDRSPLFSETIHDPNPCPESSASFLSRITFWWITGLIVRGYRQPLEGSDLWSLNKEDTSEQVVPVLVKNWKKECAKTRKQPVKVVYSSKDPAQPKESSKVDANEEVEALIVKSPQKEWNPSLFKVLYKTFGPYFLMSFFFKAIHDLMMFSGPQILKLLIKFVNDTKAPDWQGYFYTVLLFVTACLQTLVLHQYFHICFVSGMRIKTAVIGAVYRKALVITNSARKSSTVGEIVNLMSVDAQRFMDLATYINMIWSAPLQVILALYLLWLNLGPSVLAGVAVMVLMVPVNAVMAMKTKTYQVAHMKSKDNRIKLMNEILNGIKVLKLYAWELAFKDKVLAIRQEELKVLKKSAYLSAVGTFTWVCTPFLVALCTFAVYVTIDENNILDAQTAFVSLALFNILRFPLNILPMVISSIVQASVSLKRLRIFLSHEELEPDSIERRPVKDGGGTNSITVRNATFTWARSDPPTLNGITFSIPEGALVAVVGQVGCGKSSLLSALLAEMDKVEGHVAIKGSVAYVPQQAWIQNDSLRENILFGCQLEEPYYRSVIQACALLPDLEILPSGDRTEIGEKGVNLSGGQKQRVSLARAVYSNADIYLFDDPLSAVDAHVGKHIFENVIGPKGMLKNKTRILVTHSMSYLPQVDVIIVMSGGKISEMGSYQELLARDGAFAEFLRTYASTEQEQDAEENGVTGVSGPGKEAKQMENGMLVTDSAGKQLQRQLSSSSSYSGDISRHHNSTAELQKAEAKKEETWKLMEADKAQTGQVKLSVYWDYMKAIGLFISFLSIFLFMCNHVSALASNYWLSLWTDDPIVNGTQEHTKVRLSVYGALGISQGIAVFGYSMAVSIGGILASRCLHVDLLHSILRSPMSFFERTPSGNLVNRFSKELDTVDSMIPEVIKMFMGSLFNVIGACIVILLATPIAAIIIPPLGLIYFFVQRFYVASSRQLKRLESVSRSPVYSHFNETLLGVSVIRAFEEQERFIHQSDLKVDENQKAYYPSIVANRWLAVRLECVGNCIVLFAALFAVISRHSLSAGLVGLSVSYSLQVTTYLNWLVRMSSEMETNIVAVERLKEYSETEKEAPWQIQETAPPSSWPQVGRVEFRNYCLRYREDLDFVLRHINVTINGGEKVGIVGRTGAGKSSLTLGLFRINESAEGEIIIDGINIAKIGLHDLRFKITIIPQDPVLFSGSLRMNLDPFSQYSDEEVWTSLELAHLKDFVSALPDKLDHECAEGGENLSVGQRQLVCLARALLRKTKILVLDEATAAVDLETDDLIQSTIRTQFEDCTVLTIAHRLNTIMDYTRVIVLDKGEIQEYGAPSDLLQQRGLFYSMAKDAGLV

SEQ ID NO: 16598 - protein, 933 aa, Homo Sapiens; identical to SEQ ID NO: 15481

SEQ ID NO: 16599 - protein, 173 aa, Homo Sapiens
MQSELCFADIHDSDGSSSSSHQSLKSTAKWAASLENLLEDPEGVKRFREFLKKEFSEENVLFWLACEDFKKMQDKTQMQEKAKEIYMTFLSSKASSQVNVEGQSRLNEKILEEPHPLMFQKLQDQIFNLMKYDSYSRFLKSDLFLKHKRTEEEEEDLPDAQTAAKRASRIYNT

SEQ ID NO: 16600 - protein, 225 aa, Homo Sapiens
MVTHSKFPAAGMSRPLDTSLRLKTFSSKSEYQLVVNAVRKLQESGFYWSAVTGGEANLLLSAEPAGTFLIRDSSDQRHFFTLSVKTQSGTKNLRIQCEGGSFSLQSDPRSTQPVPRFDCVLKLVHHYMPPPGAPSFPSPPTEPSSEVPEQPSAQPLPGSPPRRAYYIYSGGEKIPLVLSRPLSSNVATLQHLCRKTVNGHLDSYEKVTQLPGPIREFLDQYDAPL

SEQ ID NO: 16601 - protein, 313 aa, Homo Sapiens
MPVAGSELPRRPLPPAAQERDAEPRPPHGELQYLGQIQHILRCGVRKDDRTGTGTLSVFGMQARYSLRDEFPLLTTKRVFWKGVLEELLWFIKGSTNAKELSSKGVKIWDANGSRDFLDSLGFSTREEGDLGPVYGFQWRHFGAEYRDMESDYSGQGVDQLQRVIDTIKTNPDDRRIIMCAWNPRDLPLMALPPCHALCQFYVVNSELSCQLYQRSGDMGLGVPFNIASYALLTYMIAHITGLKPGDFIHTLGDAHIYLNHIEPLKIQLQREPRPFPKLRILRKVEKIDDFKAEDFQIEGYNPHPTIKMEMAV

SEQ ID NO: 16602 - protein, 533 aa, Homo Sapiens
MAVESQGGRPLVLGLLLCVLGPVVSHAGKILLIPVDGSHWLSMLGAIQQLQQRGHEIVVLAPDASLYIRDGAFYTLKTYPVPFQREDVKESFVSLGHNVFENDSFLQRVIKTYKKIKKDSAMLLSGCSHLLHNKELMASLAESSFDVMLTDPFLPCSPIVAQYLSLPTVFFLHALPCSLEFEATQCPNPFSYVPRPLSSHSDHMTFLQRVKNMLIAFSQNFLCDVVYSPYATLASEFLQREVTVQDLLSSASVWLFRSDFVKDYPRPIMPNMVFVGGINCLHQNPLSQEFEAYINASGEHGIVVFSLGSMVSEIPEKKAMAIADALGKIPQTVLWRYTGTRPSNLANNTILVKWLPQNDLLGHPMTRAFITHAGSHGVYESICNGVPMVMMPLFGDQMDNAKRMETKGAGVTLNVLEMTSEDLENALKAVINDKSYKENIMRLSSLHKDRPVEPLDLAVFWVEFVMRHKGAPHLRPAAHDLTWYQYHSLDVIGFLLAVVLTVAFITFKCCAYGYRKCLGKKGRVKKAHKSKTH

SEQ ID NO: 16603 - protein, 2002 aa, Homo Sapiens; identical to SEQ ID NO: 15749

SEQ ID NO: 16604 - protein, 912 aa, Homo Sapiens; identical to SEQ ID NO: 14891

SEQ ID NO: 16605 - protein, 193 aa, Homo Sapiens
MAAIRKKLVIVGDGACGKTCLLIVFSKDQFPEVYVPTVFENYVADIEVDGKQVELALWDTAGQEDYDRLRPLSYPDTDVILMCFSIDSPDSLENIPEKWTPEVKHFCPNVPIILVGNKKDLRNDEHTRRELAKMKQEPVKPEEGRDMANRIGAFGYMECSAKTKDGVREVFEMATRAALQARRGKKKSGCLVL

SEQ ID NO: 16606 - protein, 845 aa, Homo Sapiens
MELWRQCTHWLIQCRVLPPSHRVTWDGAQVCELAQALRDGVLLCQLLNNLLPHAINLREVNLRPQMSQFLCLKNIRTFLSTCCEKFGLKRSELFEAFDLFDVQDFGKVIYTLSALSWTPIAQNRGIMPFPTEEESVGDEDIYSGLSDQIDDTVEEDEDLYDCVENEEAEGDEIYEDLMRSEPVSMPPKMTEYDKRCCCLREIQQTEEKYTDTLGSIQQHFLKPLQRFLKPQDIEIIFINIEDLLRVHTHFLKEMKEALGTPGAANLYQVFIKYKERFLVYGRYCSQVESASKHLDRVAAAREDVQMKLEECSQRANNGRFTLRDLLMVPMQRVLKYHLLLQELVKHTQEAMEKENLRLALDAMRDLAQCVNEVKRDNETLRQITNFQLSIENLDQSLAHYGRPKIDGELKITSVERRSKMDRYAFLLDKALLICKRRGDSYDLKDFVNLHSFQVRDDSSGDRDNKKWSHMFLLIEDQGAQGYELFFKTRELKKKWMEQFEMAISNIYPENATANGHDFQMFSFEETTSCKACQMLLRGTFYQGYRCHRCRASAHKECLGRVPPCGRHGQDFPGTMKKDKLHRRAQDKKRNELGLPKMEVFQEYYGLPPPPGAIGPFLRLNPGDIVELTKAEAEQNWWEGRNTSTNEIGWFPCNRVKPYVHGPPQDLSVHLWYAGPMERAGAESILANRSDGTFLVRQRVKDAAEFAISIKYNVEVKHIKIMTAEGLYRITEKKAFRGLTELVEFYQQNSLKDCFKSLDTTLQFPFKEPEKRTISRPAVGSTKYFGTAKARYDFCARDRSELSLKEGDIIKILNKKGQQGWWRGEIYGRVGWFPANYVEEDYSEYC

SEQ ID NO: 16607 - protein, 158 aa, Homo Sapiens
MSSAIERKSLDPSEEPVDEVLQIPPSLLTCGGCQQNIGDRYFLKAIDQYWHEDCLSCDLCGCRLGEVGRRLYYKLGRKLCRRDYLRLFGQDGLCASCDKRIRAYEMTMRVKDKVYHLECFKCAACQKHFCVGDRYLLINSDIVCEQDIYEWTKINGMI

SEQ ID NO: 16608 - protein, 331 aa, Homo Sapiens; identical to SEQ ID NO: 15705

SEQ ID NO: 16609 - protein, 211 aa, Homo Sapiens
MVAHNQVAADNAVSTAAEPRRRPEPSSSSSSSPAAPARPRPCPAVPAPAPGDTHFRTFRSHADYRRITRASALLDACGFYWGPLSVHGAHERLRAEPVGTFLVRDSRQRNCFFALSVKMASGPTSIRVHFQAGRFHLDGSRESFDCLFELLEHYVAAPRRMLGAPLRQRRVRPLQELCRQRIVATVGRENLARIPLNPVLRDYLSSFPFQI

SEQ ID NO: 16610 - protein, 283 aa, Homo Sapiens; identical to SEQ ID NO: 13574

SEQ ID NO: 16611 - protein, 337 aa, Homo Sapiens
MNSTCIEEQHDLDHYLFPIVYIFVIIVSIPANIGSLCVSFLQAKKESELGIYLFSLSLSDLLYALTLPLWIDYTWNKDNWTFSPALCKGSAFLMYMNFYSSTAFLTCIAVDRYLAVVYPLKFFFLRTRRFALMVSLSIWILETIFNAVMLWEDETVVEYCDAEKSNFTLCYDKYPLEKWQINLNLFRTCTGYAIPLVTILICNRKVYQAVRHNKATENKEKKRIIKLLVSITVTFVLCFTPFHVMLLIRCILEHAVNFEDHSNSGKRTYTMYRITVALTSLNCVADPILYCFVTETGRYDMWNILKFCTGRCNTSQRQRKRILSVSTKDTMELEVLE

SEQ ID NO: 16612 - protein, 1755 aa, Homo Sapiens
MLSATPLYGNVHSWMNSERVRMCGASEDRKILVNDGDASKARLELREENPLNHNVVDASTAHRIDGLAALSMDRTGLIREGLRVPGNIVYSSLCGLGSEKGREAATSTLGGLGFSSERNPEMQFKPNTPETVEASAVSGKPPNGFSAIYKTPPGIQKSAVATAEALGLDRPASDKQSPLNINGASYLRLPWVNPYMEGATPAIYPFLDSPNKYSLNMYKALLPQQSYSLAQPLYSPVCTNGERFLYLPPPHYVGPHIPSSLASPMRLSTPSASPAIPPLVHCADKSLPWKMGVSPGNPVDSHAYPHIQNSKQPRVPSAKAVTSGLPGDTALLLPPSPRPSPRVHLPTQPAADTYSEFHKHYARISTSPSVALSKPYMTVSSEFPAARLSNGKYPKAPEGGEGAQPVPGHARKTAVQDRKDGSSPPLLEKQTVTKDVTDKPLDLSSKVVDVDASKADHMKKMAPTVLVHSRAGSGLVLSGSEIPKETLSPPGNGCAIYRSEIISTAPSSWVVPGPSPNEENNGKSMSLKNKALDWAIPQQRSSSCPRMGGTDAVITNVSGSVSSAGRPASASPAPNANADGTKTSRSSVETTPSVIQHVGQPPATPAKHSSSTSSKGAKASNPEPSFKANENGLPPSSIFLSPNEAFRSPPIPYPRSYLPYPAPEGIAVSPLSLHGKGPVYPHPVLLPNGSLFPGHLAPKPGLPYGLPTGRPEFVTYQDALGLGMVHPMLIPHTPIEITKEEKPERRSRSHERARYEDPTLRNRFSEILETSSTKLHPDVPTDKNLKPNPNWNQGKTVVKSDKLVYVDLLREEPDAKTDTNVSKPSFAAESVGQSAEPPKPSVEPALQQHRDFIALREELGRISDFHETYTFKQPVFTVSKDSVLAGTNKENLGLPVSTPFLEPPLGSDGPAVTFGKTQEDPKPFCVGSAPPSVDVTPTYTKDGADEAESNDGKVLKPKPSKLAKRIANSAGYVGDRFKCVTTELYADSSQLSREQRALQMEGLQEDSILCLPAAYCERAMMRFSELEMKEREGGHPATKDSEMCKFSPADWERLKGNQDKKPKSVTLEEAIAEQNESERCEYSVGNKHRDPFEAPEDKDLPVEKYFVERQPVSEPPADQVASDMPHSPTLRVDRKRKVSGDSSHTETTAEEVPEDPLLKAKRRRVSKDDWPEREMTNSSSNHLEDPHYSELTNLKVCIELTGLHPKKQRHLLHLRERWEQQVSAADGKPGRQSRKEVTQATQPEAIPQGTNITEEKPGRKRAEAKGNRSWSEESLKPSDNEQGLPVFSGSPPMKSLSSTSAGGKKQAQPSCAPASRPPAKQQKIKENQKTDVLCADEEEDCQAASLLQKYTDNSEKPSGKRLCKTKHLIPQESRRGLPLTGEYYVENADGKVTVRRFRKRPEPSSDYDLSPAKQEPKPFDRLQQLLPASQSTQLPCSSSPQETTQSRPMPPEARRLIVNKNAGETLLQRAARLGYEEVVLYCLENKICDVNHRDNAGYCALHEACARGWLNIVRHLLEYGADVNCSAQDGTRPLHDAVENDHLEIVRLLLSYGADPTLATYSGRTIMKMTHSELMEKFLTDYLNDLQGRNDDDASGTWDFYGSSVCEPDDESGYDVLANPPGPEDQDDDDDAYSDVFEFEFSETPLLPCYNIQVSVAQGPRNWLLLSDVLKKLKMSSRIFRCNFPNVEIVTIAEAEFYRQVSASLLFSCSKDLEAFNPESKELLDLVEFTNEIQTLLGSSVEWLHPSDLASDNYW

SEQ ID NO: 16613 - protein, 289 aa, Homo Sapiens; identical to SEQ ID NO: 14650

SEQ ID NO: 16614 - protein, 664 aa, Homo Sapiens; identical to SEQ ID NO: 12683

SEQ ID NO: 16615 - protein, 303 aa, Homo Sapiens; identical to SEQ ID NO: 15310

SEQ ID NO: 16616 - protein, 254 aa, Homo Sapiens; identical to SEQ ID NO: 14707

SEQ ID NO: 16617 - protein, 417 aa, Homo Sapiens; identical to SEQ ID NO: 13599

SEQ ID NO: 16618 - protein, 250 aa, Homo Sapiens [sequence omitted]

SEQ ID NO: 16619 - protein, 168 aa, Homo Sapiens
MFQIPEFEPSEQEDSSSAERGLGPSPAGDGPSGSGKHHRQAPGLLWDASHQQEQPTSSSHHGGAGAVEIRSRHSSYPAGTEDDEGMGEEPSPFRGRSRSAPPNLWAAQRYGRELRRMSDEFVDSFKKGLPRPKSAGTATQMRQSSSWTRVFQSWWDRNLGRGSSAPSQ

SEQ ID NO: 16620 - protein, 184 aa, Homo Sapiens
MLQMAGQCSQNEYFDSLLHACIPCQLRCSSNTPPLTCQRYCNASVTNSVKGTNAILWTCLGLSLIISLAVFVLMFLLRKINSEPLKDEFKNTGSGLLGMANIDLEKSRTGDEIILPRGLEYTVEECTCEDCIKSKPKVDSDHCFPLPAMEEGATILVTTKTNDYCKSLPAALSATEIEKSISAR

SEQ ID NO: 16621 - protein, 96 aa, Homo Sapiens; identical to SEQ ID NO: 2120

SEQ ID NO: 16622 - protein, 97 aa, Homo Sapiens; identical to SEQ ID NO: 2121

SEQ ID NO: 16623 - protein, 98 aa, Homo Sapiens; identical to SEQ ID NO: 2122

SEQ ID NO: 16624 - protein, 93 aa, Homo Sapiens; identical to SEQ ID NO: 2126

SEQ ID NO: 16625 - protein, 113 aa, Homo Sapiens
MKVSVAALSCLMLVAVLGSQAQFINDAETELMMSKLPLENPVVLNSFHFAADCCTSYISQSIPCSLMKSYFETSSECSKPGVIFLTKKGRQVCAKPSGPGVQDCMKKLKPYSI

SEQ ID NO: 16626 - protein, 120 aa, Homo Sapiens; identical to SEQ ID NO: 2130

SEQ ID NO: 16627 - protein, 94 aa, Homo Sapiens; identical to SEQ ID NO: 2133

SEQ ID NO: 16628 - protein, 89 aa, Homo Sapiens; identical to SEQ ID NO: 2135

SEQ ID NO: 16629 - protein, 98 aa, Homo Sapiens; identical to SEQ ID NO: 2137

SEQ ID NO: 16630 - protein, 99 aa, Homo Sapiens; identical to SEQ ID NO: 2138

SEQ ID NO: 16631 - protein, 96 aa, Homo Sapiens; identical to SEQ ID NO: 2141

SEQ ID NO: 16632 - protein, 134 aa, Homo Sapiens; identical to SEQ ID NO: 2144

SEQ ID NO: 16633 - protein, 93 aa, Homo Sapiens; identical to SEQ ID NO: 2145

SEQ ID NO: 16634 - protein, 120 aa, Homo Sapiens
MKVSVAALSCLMLVTALGSQARVTKDAETEFMMSKLPLENPVLLDRFHATSADCCISYTPRSIPCSLLESYFETNSECSKPGVIFLTKKGRRFCANPSDKQVQVCVRMLKLDTRIKTRKN

SEQ ID NO: 16635 - protein, 119 aa, Homo Sapiens; identical to SEQ ID NO: 2149

SEQ ID NO: 16636 - protein, 150 aa, Homo Sapiens; identical to SEQ ID NO: 2152

SEQ ID NO: 16637 - protein, 94 aa, Homo Sapiens; identical to SEQ ID NO: 2155

SEQ ID NO: 16638 - protein, 112 aa, Homo Sapiens; identical to SEQ ID NO: 2157

SEQ ID NO: 16639 - protein, 127 aa, Homo Sapiens; identical to SEQ ID NO: 2159

SEQ ID NO: 16640 - protein, 92 aa, Homo Sapiens; identical to SEQ ID NO: 2161

SEQ ID NO: 16641 - protein, 92 aa, Homo Sapiens; identical to SEQ ID NO: 2163

SEQ ID NO: 16642 - protein, 91 aa, Homo Sapiens; identical to SEQ ID NO: 2175

SEQ ID NO: 16643 - protein, 99 aa, Homo Sapiens; identical to SEQ ID NO: 2180

SEQ ID NO: 16644 - protein, 99 aa, Homo Sapiens; identical to SEQ ID NO: 2181

SEQ ID NO: 16645 - protein, 355 aa, Homo Sapiens
METPNTTEDYDTTTEFDYGDATPCQKVNERAFGAQLLPPLYSLVFVIGLVGNILVVLVLVQYKRLKNMTSIYLLNLAISDLLFLFTLPFWIDYKLKDDWVFGDAMCKILSGFYYTGLYSEIFFIILLTIDRYLAIVHAVFALRARTVTFGVITSIIIWALAILASMPGLYFSKTQWEFTHHTCSLHFPHESLREWKLFQALKLNLFGLVLPLLVMIICYTGIIKILLRRPNEKKSKAVRLIFVIMIIFFLFWTPYNLTILISVFQDFLFTHECEQSRHLDLAVQVTEVIAYTHCCVNPVIYAFVGERFRKYLRQLFHRRVAVHLVKWLPFLSVDRLERVSSTSPSTGEHELSAGF

SEQ ID NO: 16646 - protein, 362 aa, Homo Sapiens
MGTEATEQVSWGHYSGDEEDAYSAEPLPELCYKADVQAFSRAFQPSVSLTVAALGLAGNGLVLATHLAARRAARSPTSAHLLQLALADLLLALTLPFAAAGALQGWSLGSATCRTISGLYSASFHAGFLFLACISADRYVAIARALPAGPRPSTPGRAHLVSVIVWLLSLLLALPALLFSQDGQREGQRRCRLIFPEGLTQTVKGASAVAQVALGFALPLGVMVACYALLGRTLLAARGPERRRALRVVVALVAAFVVLQLPYSLALLLDTADLLAARERSCPASKRKDVALLVTSGLALARCGLNPVLYAFLGLRFRQDLRRLLRGGSCPSGPQPRRGCPRRPRLSSCSAPTETHSLSWDN

SEQ ID NO: 16647 - protein, 350 aa, Homo Sapiens
MALEQNQSTDYYYEENEMNGTYDYSQYELICIKEDVREFAKVFLPVFLTIVFVIGLAGNSMVVAIYAYYKKQRTKTDVYILNLAVADLLLLFTLPFWAVNAVHGWVLGKIMCKITSALYTLNFVSGMQFLACISIDRYVAVTKVPSQSGVGKPCWIICFCVWMAAILLSIPQLVFYTVNDNARCIPIFPRYLGTSMKALIQMLEICIGFVVPFLIMGVCYFITARTLMKMPNIKISRPLKVLLTVVIVFIVTQLPYNIVKFCRAIDIIYSLITSCNMSKRMDIAIQVTESIALFHSCLNPILYVFMGASFKNYVMKVAKKYGSWRRQRQSVEEFPFDSEGPTEPTSTFSI

SEQ ID NO: 16648 - protein, 374 aa, Homo Sapiens
MLSTSRSRFIRNTNESGEEVTTFFDYDYGAPCHKFDVKQIGAQLLPPLYSLVFIFGFVGNMLVVLILINCKKLKCLTDIYLLNLAISDLLFLITLPLWAHSAANEWVFGNAMCKLFTGLYHIGYFGGIFFIILLTIDRYLAIVHAVFALKARTVTFGVVTSVITWLVAVFASVPGIIFTKCQKEDSVYVCGPYFPRGWNNFHTIMRNILGLVLPLLIMVICYSGILKTLLRCRNEKKRHRAVRVIFTIMIVYFLFWTPYNIVILLNTFQEFFGLSNCESTSQLDQATQVTETLGMTHCCINPIIYAFVGEKFRSLFHIALGCRIAPLQKPVCGGPGVRPGKNVKVTTQGLLDGRGKGKSIGRAPEASLQDKEGA

SEQ ID NO: 16649 - protein, 355 aa, Homo Sapiens
MTTSLDTVETFGTTSYYDDVGLLCEKADTRALMAQFVPPLYSLVFTVGLLGNVVVVMILIKYRRLRIMTNIYLLNLAISDLLFLVTLPFWIHYVRGHNWVFGHGMCKLLSGFYHTGLYSEIFFIILLTIDRYLAIVHAVFALRARTVTFGVITSIVTWGLAVLAALPEFIFYETEELFEETLCSALYPEDTVYSWRHFHTLRMTIFCLVLPLLVMAICYTGIIKTLLRCPSKKKYKAIRLIFVIMAVFFIFWTPYNVAILLSSYQSILFGNDCERSKHLDLVMLVTEVIAYSHCCMNPVIYAFVGERFRKYLRHFFHRHLLMHLGRYIPFLPSEKLERTSSVSPSTAEPELSIVF

SEQ ID NO: 16650 - protein, 360 aa, Homo Sapiens
MNPTDIADTTLDESIYSNYYLYESIPKPCTKEGIKAFGELFLPPLYSLVFVFGLLGNSVVVLVLFKYKRLRSMTDVYLLNLAISDLLFVFSLPFWGYYAADQWVFGLGLCKMISWMYLVGFYSGIFFVMLMSIDRYLAIVHAVFSLRARTLTYGVITSLATWSVAVFASLPGFLFSTCYTERNHTYCKTKYSLNSTTWKVLSSLEINILGLVIPLGIMLFCYSMIIRTLQHCKNEKKNKAVKMIFAVVVLFLGFWTPYNIVLFLETLVELEVLQDCTFERYLDYAIQATETLAFVHCCLNPIIYFFLGEKFRKYILQLFKTCRGLFVLCQYCGLLQIYSADTPSSSYTQSTMDHDLHDAL

SEQ ID NO: 16651 - protein, 352 aa, Homo Sapiens [sequence omitted]

SEQ ID NO: 16652 - protein, 374 aa, Homo Sapiens
MSGESMNFSDVFDSSEDYFVSVNTSYYSVDSEMLLCSLQEVRQFSRLFVPIAYSLICVFGLLGNILVVITFAFYKKARSMTDVYLLNMAIADILFVLTLPFWAVSHATGAWVFSNATCKLLKGIYAINFNCGMLLLTCISMDRYIAIVQATKSFRLRSRTLPRSKIICLVVWGLSVIISSSTFVFNQKYNTQGSDVCEPKYQTVSEPIRWKLLMLGLELLFGFFIPLMFMIFCYTFIVKTLVQAQNSKRHKAIRVIIAVVLVFLACQIPHNMVLLVTAANLGKMNRSCQSEKLIGYTKTVTEVLAFLHCCLNPVLYAFIGQKFRNYFLKILKDLWCVRRKYKSSGFSCAGRYSENISRQTSETADNDNASSFTM

SEQ ID NO: 16653 - protein, 378 aa, Homo Sapiens
MDLGKPMKSVLVVALLVIFQVCLCQDEVTDDYIGDNTTVDYTLFESLCSKKDVRNFKAWFLPIMYSIICFVGLLGNGLVVLTYIYFKRLKTMTDTYLLNLAVADILFLLTLPFWAYSAAKSWVFGVHFCKLIFAIYKMSFFSGMLLLLCISIDRYVAIVQAVSAHRHRARVLLISKLSCVGIWILATVLSIPELLYSDLQRSSSEQAMRCSLITEHVEAFITIQVAQMVIGFLVPLLAMSFCYLVIIRTLLQARNFERNKAIKVIIAVVVVFIVFQLPYNGVVLAQTVANFNITSSTCELSKQLNIAYDVTYSLACVRCCVNPFLYAFIGVKFRNDLFKLFKDLGCLSQEQLRQWSSCRHIRRSSMSVEAETTTTFSP

SEQ ID NO: 16654 - protein, 355 aa, Homo Sapiens
MDYTLDLSVTTVTDYYYPDIFSSPCDAELIQTNGKLLLAVFYCLLFVFSLLGNSLVILVLVVCKKLRSITDVYLLNLALSDLLFVFSFPFQTYYLLDQWVFGTVMCKVVSGFYYIGFYSSMFFITLMSVDRYLAVVHAVYALKVRTIRMGTTLCLAVWLTAIMATIPLLVFYQVASEDGVLQCYSFYNQQTLKWKIFTNFKMNILGLLIPFTIFMFCYIKILHQLKRCQNHNKTKAIRLVLIVVIASLLFWVPFNVVLFLTSLHSMHILDGCSISQQLTYATHVTEIISFTHCCVNPVIYAFVGEKFKKHLSEIFQKSCSQIFNYLGRQMPRESCEKSSSCQQHSSRSSSVDYIL

SEQ ID NO: 16655 - protein, 369 aa, Homo Sapiens
MTPTDFTSPIPNMADDYGSESTSSMEDYVNFNFTDFYCEKNNVRQFASHFLPPLYWLVFIVGALGNSLVILVYWYCTRVKTMTDMFLLNLAIADLLFLVTLPFWAIAAADQWKFQTFMCKVVNSMYKMNFYSCVLLIMCISVDRYIAIAQAMRAHTWREKRLLYSKMVCFTIWVLAAALCIPEILYSQIKEESGIAICTMVYPSDESTKLKSAVLTLKVILGFFLPFVVMACCYTIIIHTLIQAKKSSKHKALKVTITVLTVFVLSQFPYNCILLVQTIDAYAMFISNCAVSTNIDICFQVTQTIAFFHSCLNPVLYVFVGERFRRDLVKTLKNLGCISQAQWVSFTRREGSLKLSSMLLETTSGALSL

SEQ ID NO: 16656 - protein, 836 aa, Homo Sapiens
MARLGNCSLTWAALIILLLPGSLEECGHISVSAPIVHLGDPITASCIIKQNCSHLDPEPQILWRLGAELQPGGRQQRLSDGTQESIITLPHLNHTQAFLSCCLNWGNSLQILDQVELRAGYPPAIPHNLSCLMNLTTSSLICQWEPGPETHLPTSFTLKSFKSRGNCQTQGDSILDCVPKDGQSHCCIPRKHLLLYQNMGIWVQAENALGTSMSPQLCLDPMDVVKLEPPMLRTMDPSPEAAPPQAGCLQLCWEPWQPGLHINQKCELRHKPQRGEASWALVGPLPLEALQYELCGLLPATAYTLQIRCIRWPLPGHWSDWSPSLELRTTERAPTVRLDTWWRQRQLDPRTVQLFWKPVPLEEDSGRIQGYVVSWRPSGQAGAILPLCNTTELSCTFHLPSEAQEVALVAYNSAGTSRPTPVVFSESRGPALTRLHAMARDPHSLWVGWEPPNPWPQGYVIEWGLGPPSASNSNKTWRMEQNGRATGFLLKENIRPFQLYEIIVTPLYQDTMGPSQHVYAYSQEMAPSHAPELHLKHIGKTWAQLEWVPEPPELGKSPLTHYTIFWTNAQNQSFSAILNASSRGFVLHGLEPASLYHIHLMAASQAGATNSTVLTLMTLTPEGSELHIILGLFGLLLLLTCLCGTAWLCCSPNRKNPLWPSVPDPAHSSLGSWVPTIMEEDAFQLPGLGTPPITKLTVLEEDEKKPVPWESHNSSETCGLPTLVQTYVLQGDPRAVSTQPQSQSGTSDQVLYGQLLGSPTSPGPGHYLRCDSTQPLLAGLTPSPKSYENLWFQASPLGTLVTPAPSQEDDCVFGPLLNFPLLQGIRVHGMEALGSF

SEQ ID NO: 16657 - protein, 972 aa, Homo Sapiens; identical to SEQ ID NO: 3582

SEQ ID NO: 16658 - protein, 400 aa, Homo Sapiens; identical to SEQ ID NO: 3591

SEQ ID NO: 16659 - protein, 976 aa, Homo Sapiens [sequence omitted]

SEQ ID NO: 16660 - protein, 1097 aa, Homo Sapiens; identical to SEQ ID NO: 7860

SEQ ID NO: 16661 - protein, 455 aa, Homo Sapiens; identical to SEQ ID NO: 13589

SEQ ID NO: 16662 - protein, 461 aa, Homo Sapiens; identical to SEQ ID NO: 13591

SEQ ID NO: 16663 - protein, 569 aa, Homo Sapiens; identical to SEQ ID NO: 6962

SEQ ID NO: 16664 - protein, 551 aa, Homo Sapiens; identical to SEQ ID NO: 7030

SEQ ID NO: 16665 - protein, 378 aa, Homo Sapiens; identical to SEQ ID NO: 7076

SEQ ID NO: 16666 - protein, 825 aa, Homo Sapiens; identical to SEQ ID NO: 7097

SEQ ID NO: 16667 - protein, 468 aa, Homo Sapiens; identical to SEQ ID NO: 7125

SEQ ID NO: 16668 - protein, 459 aa, Homo Sapiens [sequence omitted]

SEQ ID NO: 16669 - protein, 918 aa, Homo Sapiens; identical to SEQ ID NO: 7130

SEQ ID NO: 16670 - protein, 369 aa, Homo Sapiens
MLKPSLPFTSLLFLQLPLLGVGLNTTILTPNGNEDTTADFFLTTMPTDSLSVSTLPLPEVQCFVFNVEYMNCTWNSSSEPQPTNLTLHYWYKNSDNDKVQKCSHYLFSEEITSGCQLQKKEIHLYQTFVVQLQDPREPRRQATQMLKLQNLVIPWAPENLTLHKLSESQLELNWNNRFLNHCLEHLVQYRTDWDHSWTEQSVDYRHKFSLPSVDGQKRYTFRVRSRFNPLCGSAQHWSEWSHPIHWGSNTSKENPFLFALEAVVISVGSMGLIISLLCVYFWLERTMPRIPTLKNLEDLVTEYHGNFSAWSGVSKGLAESLQPDYSERLCLVSEIPPKGGALGEGPGASPCNQHSPYWAPPCYTLKPET

SEQ ID NO: 16671 - protein, 234 aa, Homo Sapiens
MDPGLQQALNGMAPPGDTAMHVPAGSVASHLGTTSRSYFYLTTATLALCLVFTVATIMVLVVQRTDSIPNSPDNVPLKGGNCSEDLLCILKRAPFKKSWAYLQVAKHLNKTKLSWNKDGILHGVRYQDGNLVIQFPGLYFIICQLQFLVQCPNNSVDLKLELLINKHIKKQALVTVCESGMQTKHVYQNLSQFLLDYLQVNTTISVNVDTFQYIDTSTFPLENVLSIFLYSNSD

SEQ ID NO: 16672 - protein, 261 aa, Homo Sapiens
MIETYNQTSPRSAATGLPISMKIFMYLLTVFLITQMIGSALFAVYLHRRLDKIEDERNLHEDFVFMKTIQRCNTGERSLSLLNCEEIKSQFEGFVKDIMLNKEETKKENSFEMQKGDQNPQIAAHVISEASSKTTSVLQWAEKGYYTMSNNLVTLENGKQLTVKRQGLYYIYAQVTFCSNREASSQAPFIASLCLKSPGRFERILLRAANTHSSAKPCGQQSIHLGGVFELQPGASVFVNVTDPSQVSHGTGFTSFGLLKL

SEQ ID NO: 16673 - protein, 281 aa, Homo Sapiens; identical to SEQ ID NO: 16510

SEQ ID NO: 16674 - protein, 662 aa, Homo Sapiens; identical to SEQ ID NO: 6869

SEQ ID NO: 16675 - protein, 427 aa, Homo Sapiens; identical to SEQ ID NO: 6880

SEQ ID NO: 16676 - protein, 380 aa, Homo Sapiens
MAFVCLAIGCLYTFLISTTFGCTSSSDTEIKVNPPQDFEIVDPGYLGYLYLQWQPPLSLDHFKECTVEYELKYRNIGSETWKTIITKNLHYKDGFDLNKGIEAKIHTLLPWQCTNGSEVQSSWAETTYWISPQGIPETKVQDMDCVYYNWQYLLCSWKPGIGVLLDTNYNLFYWYEGLDHALQCVDYIKADGQNIGCRFPYLEASDYKDFYICVNGSSENKPIRSSYFTFQLQNIVKPLPPVYLTFTRESSCEIKLKWSIPLGPIPARCFDYEIEIREDDTTLVTATVENETYTLKTTNETRQLCFVVRSKVNIYCSDDGIWSEWSDKQCWEGEDLSKKTLLRFWLPFGFILILVIFVTGLLLRKPNTYPKMIPEFFCDT

SEQ ID NO: 16677 - protein, 272 aa, Homo Sapiens
MDSYLLMWGLLTFIMVPGCQAELCDDDPPEIPHATFKAMAYKEGTMLNCECKRGFRRIKSGSLYMLCTGNSSHSSWDNQCQCTSSATRNTTKQVTPQPEEQKERKTTEMQSPMQPVDQASLPGHCREPPPWENEATERIYHFVVGQMVYYQCVQGYRALHRGPAESVCKMTHGKTRWTQPQLICTGEMETSQFPGEEKPQASPEGRPESETSCLVTTTDFQIQTEMAATMETSIFTTEYQVAVAGCVFLLISVLLLSGLTWQRRQRKSRRTI

SEQ ID NO: 16678 - protein, 260 aa, Homo Sapiens
MARPHPWWLCVLGTLVGLSATPAPKSCPERHYWAQGKLCCQMCEPGTFLVKDCDQHRKAAQCDPCIPGVSFSPDHHTRPHCESCRHCNSGLLVRNCTITANAECACRNGWQCRDKECTECDPLPNPSLTARSSQALSPHPQPTHLPYVSEMLEARTAGHMQTLADFRQLPARTLSTHWPPQRSLCSSDFIRILVIFSGMFLVFTLAGALFLHQRRKYRSNKGESPVEPAEPCHYSCPREEEGSTIPIQEDYRKPEPACSP

SEQ ID NO: 16679 - protein, 595 aa, Homo Sapiens
MRVLLAALGLLFLGALRAFPQDRPFEDTCHGNPSHYYDKAVRRCCYRCPMGLFPTQQCPQRPTDCRKQCEPDYYLDEADRCTACVTCSRDDLVEKTPCAWNSSRVCECRPGMFCSTSAVNSCARCFFHSVCPAGMIVKFPGTAQKNTVCEPASPGVSPACASPENCKEPSSGTIPQAKPTPVSPATSSASTMPVRGGTRLAQEAASKLTRAPDSPSSVGRPSSDPGLSPTQPCPEGSGDCRKQCEPDYYLDEAGRCTACVSCSRDDLVEKTPCAWNSSRTCECRPGMICATSATNSCARCVPYPICAAETVTKPQDMAEKDTTFEAPPLGTQPDCNPTPENGEAPASTSPTQSLLVDSQASKTLPIPTSAPVALSSTGKPVLDAGPVLFWVILVLVVVVGSSAFLLCHRRACRKRIRQKLHLCYPVQTSQPKLELVDSRPRRSSTQLRSGASVTEPVAEERGLMSQPLMETCHSVGAAYLESLPLQDASPAGGPSSPRDLPEPRVSTEHTNNKIEKIYIMKADTVIVGTVKAELPEGRGLAGPAEPELEEELEADHTPHYPEQETEPPLGSCSDVMLSVEEEGKEDPLPTAASGK

SEQ ID NO: 16680 - protein, 458 aa, Homo Sapiens; identical to SEQ ID NO: 2334

SEQ ID NO: 16681 - protein, 277 aa, Homo Sapiens; identical to SEQ ID NO: 2337

SEQ ID NO: 16682 - protein, 193 aa, Homo Sapiens
MPEEGSGCSVRRRPYGCVLRAALVPLVAGLVICLVVCIQRFAQAQQQLPLESLGWDVAELQLNHTGPQQDPRLYWQGGPALGRSFLHGPELDKGQLRIHRDGIYMVHIQVTLAICSSTTASRHHPTTLAVGICSPASRSISLLRLSFHQGCTIASQRLTPLARGDTLCTNLTGTLLPSRNTDETFFGVQWVRP

SEQ ID NO: 16683 - protein, 335 aa, Homo Sapiens; identical to SEQ ID NO: 5109

SEQ ID NO: 16684 - protein, 400 aa, Homo Sapiens; identical to SEQ ID NO: 3591

SEQ ID NO: 16685 - protein, 489 aa, Homo Sapiens; identical to SEQ ID NO: 6747

SEQ ID NO: 16686 - protein, 398 aa, Homo Sapiens; identical to SEQ ID NO: 6966

SEQ ID NO: 16687 - protein, 897 aa, Homo Sapiens
MVLAQGLLSMALLALCWERSLAGAEETIPLQTLRCYNDYTSHITCRWADTQDAQRLVNVTLIRRVNEDLLEPVSCDLSDDMPWSACPHPRCVPRRCVIPCQSFVVTDVDYFSFQPDRPLGTRLTVTLTQHVQPPEPRDLQISTDQDHFLLTWSVALGSPQSHWLSPGDLEFEVVYKRLQDSWEDAAILLSNTSQATLGPEHLMPSSTYVARVRTRLAPGSRLSGRPSKWSPEVCWDSQPGDEAQPQNLECFFDGAAVLSCSWEVRKEVASSVSFGLFYKPSPDAGEEECSPVLREGLGSLHTRHHCQIPVPDPATHGQYIVSVQPRRAEKHIKSSVNIQMAPPSLNVTKDGDSYSLRWETMKMRYEHIDHTFEIQYRKDTATWKDSKTETLQNAHSMALPALEPSTRYWARVRVRTSRTGYNGIWSEWSEARSWDTESVLPMWVLALIVIFLTIAVLLALRFCGIYGYRLRRKWEEKIPNPSKSHLFQNGSAELWPPGSMSAFTSGSPPHQGPWGSRFPELEGVFPVGFGDSEVSPLTIEDPKHVCDPPSGPDTTPAASDLPTEQPPSPQPGPPAASHTPEKQASSFDFNGPYLGPPHSRSLPDILGQPEPPQEGGSQKSPPPGSLEYLCLPAGGQVQLVPLAQAMGPGQAVEVERRPSQGAAGSPSLESGGGPAPPALGPRVGGQDQKDSPVAIPMSSGDTEDPGVASGYVSSADLVFTPNSGASSVSLVPSLGLPSDQTPSLCPGLASGPPGAPGPVKSGFEGYVELPPIEGRSPRSPRNNPVPPEAKSPVLNPGERPADVSPTSPQPEGLLVLQQVGDYCFLPGLGPGPLSLRSKPSSPGPGPEIKNLDQAFQVKKPPGQAVPQVPVIQLFKALKQQDYLSLPPWEVNKPGEVC

SEQ ID NO: 16688 - protein, 897 aa, Homo Sapiens; identical to SEQ ID NO: 16687

SEQ ID NO: 16689 - protein, 255 aa, Homo Sapiens; identical to SEQ ID NO: 14706

SEQ ID NO: 16690 - protein, 578 aa, Homo Sapiens
MLPCLVVLLAALLSLRLGSDAHGTELPSPPSVWFEAEFFHHILHWTPIPNQSESTCYEVALLRYGIESWNSISNCSQTLSYDLTAVTLDLYHSNGYRARVRAVDGSRHSNWTVTNTRFSVDEVTLTVGSVNLEIHNGFILGKIQLPRPKMAPANDTYESIFSHFREYEIAIRKVPGNFTFTHKKVKHENFSLLTSGEVGEFCVQVKPSVASRSNKGMWSKEECISLTRQYFTVTNVIIFFAFVLLLSGALAYCLALQLYVRRRKKLPSVLLFKKPSPFIFISQRPSPETQDTIHPLDEEAFLKVSPELKNLDLHGSTDSGFGSTKPSLQTEEPQFLLPDPHPQADRTLGNREPPVLGDSCSSGSSNSTDSGICLQEPSLSPSTGPTWEQQVGSNSRGQDDSGIDLVQNSEGRAGDTQGGSALGHHSPPEPEVPGEEDPAAVAFQGYLRQTRCAEEKATKTGCLEEESPLTDGLGPKFGRCLVDEAGLHPPALAKGYLKQDPLEMTLASSGAPTGQWNQPTEEWSLLALSSCSDLGISDWSFAHDLAPLGCVAAPGGLLGSFNSDLVTLPLISSLQSSE

SEQ ID NO: 16691 - protein, 866 aa, Homo Sapiens; identical to SEQ ID NO: 6906

SEQ ID NO: 16692 - protein, 397 aa, Homo Sapiens; identical to SEQ ID NO: 3787

SEQ ID NO: 16693 - protein, 355 aa, Homo Sapiens
MDQFPESVTENFEYDDLAEACYIGDIVVFGTVFLSIFYSVIFAIGLVGNLLVVFALTNSKKPKSVTDIYLLNLALSDLLFVATLPFWTHYLINEKGLHNAMCKFTTAFFFIGFFGSIFFITVISIDRYLAIVLAANSMNNRTVQHGVTISLGVWAAAILVAAPQFMFTKQKENECLGDYPEVLQEIWPVLRNVETNFLGFLLPLLIMSYCYFRIIQTLFSCKNHKKAKAIKLILLVVIVFFLFWTPYNVMIFLETLKLYDFFPSCDMRKDLRLALSVTETVAFSHCCLNPLIYAFAGEKFRRYLYHLYGKCLAVLCGRSVHVDFSSSESQRSRHGSVLSSNFTYHTSDGDALLLL

SEQ ID NO: 16694 - protein, 107 aa, Homo Sapiens; identical to SEQ ID NO: 3795

SEQ ID NO: 16695 - protein, 98 aa, Homo Sapiens; identical to SEQ ID NO: 3796

SEQ ID NO: 16696 - protein, 94 aa, Homo Sapiens; identical to SEQ ID NO: 3797

SEQ ID NO: 16697 - protein, 93 aa, Homo Sapiens; identical to SEQ ID NO: 3801

SEQ ID NO: 16698 - protein, 109 aa, Homo Sapiens; identical to SEQ ID NO: 3805

SEQ ID NO: 16699 - protein, 111 aa, Homo Sapiens; identical to SEQ ID NO: 3807

SEQ ID NO: 16700 - protein, 254 aa, Homo Sapiens
MGRDLRPGSRVLLLLLLLLLVYLTQPGNGNEGSVTGSCYCGKRISSDSPPSVQFMNRLRKHLRAYHRCLYYTRFQLLSWSVCGGNKDPWVQELMSCLDLKECGHAYSGIVAHQKHLLPTSPPISQASEGASSDIHTPAQMLLSTLQSTQRPTLPVGSLSSDKELTRPNETTIHTAGHSLAAGPEAGENQKQPEKNAGPTARTSATVPVLCLLAIIFILTAALSYVLCKRRRGQSPQSSPDLPVHYIPVAPDSNT

SEQ ID NO: 16701 - protein, 107 aa, Homo Sapiens; identical to SEQ ID NO: 3810

SEQ ID NO: 16702 - protein, 107 aa, Homo Sapiens; identical to SEQ ID NO: 3811

SEQ ID NO: 16703 - protein, 101 aa, Homo Sapiens; identical to SEQ ID NO: 10258

SEQ ID NO: 16704 - protein, 114 aa, Homo Sapiens; identical to SEQ ID NO: 3812

SEQ ID NO: 16705 - protein, 114 aa, Homo Sapiens; identical to SEQ ID NO: 3814

SEQ ID NO: 16706 - protein, 128 aa, Homo Sapiens; identical to SEQ ID NO: 10670

SEQ ID NO: 16707 - protein, 99 aa, Homo Sapiens; identical to SEQ ID NO: 3816

SEQ ID NO: 16708 - protein, 125 aa, Homo Sapiens; identical to SEQ ID NO: 3817

SEQ ID NO: 16709 - protein, 350 aa, Homo Sapiens
MSNITDPQMWDFDDLNFTGMPPADEDYSPCMLETETLNKYVVIIAYALVFLLSLLGNSLVMLVILYSRVGRSVTDVYLLNLALADLLFALTLPIWAASKVNGWIFGTFLCKVVSLLKEVNFYSGILLLACISVDRYLAIVHATRTLTQKRHLVKFVCLGCWGLSMNLSLPFFLFRQAYHPNNSSPVCYEVLGNDTAKWRMVLRILPHTFGFIVPLFVMLFCYGFTLRTLFKAHMGQKHRAMRVIFAVVLIFLLCWLPYNLVLLADTLMRTQVIQESCERRNNIGRALDATEILGFLHSCLNPIIYAFIGQNFRHGFLKILAMHGLVSKEFLARHRVTSYTSSSVNVSSNL

SEQ ID NO: 16710 - protein, 360 aa, Homo Sapiens
MEDFNMESDSFEDFWKGEDLSNYSYSSTLPPFLLDAAPCEPESLEINKYFVVIIYALVFLLSLLGNSLVMLVILYSRVGRSVTDVYLLNLALADLLFALTLPIWAASKVNGWIFGTFLCKVVSLLKEVNFYSGILLLACISVDRYLAIVHATRTLTQKRYLVKFICLSIWGLSLLLALPVLLFRRTVYSSNVSPACYEDMGNNTANWRMLLRILPQSFGFIVPLLIMLFCYGFTLRTLFKAHMGQKHRAMRVIFAVVLIFLLCWLPYNLVLLADTLMRTQVIQETCERRNHIDRALDATEILGILHSCLNPLIYAFIGQKFRHGLLKILAIHGLISKDSLPKDSRPSFVGSSSGHTSTTL

SEQ ID NO: 16711 - protein, 368 aa, Homo Sapiens
MVLEVSDHQVLNDAEVAALLENFSSSYDYGENESDSCCTSPPCPQDFSLNFDRAFLPALYSLLFLLGLLGNGAVAAVLLSRRTALSSTDTFLLHLAVADTLLVLTLPLWAVDAAVQWVFGSGLCKVAGALFNINFYAGALLLACISFDRYLNIVHATQLYRRGPPARVTLTCLAVWGLCLLFALPDFIFLSAHHDERLNATHCQYNFPQVGRTALRVLQLVAGFLLPLLVMAYCYAHILAVLLVSRGQRRLRAMRLVVVVVVAFALCWTPYHLVVLVDILMDLGALARNCGRESRVDVAKSVTSGLGYMHCCLNPLLYAFVGVKFRERMWMLLLRLGCPNQRGLQRQPSSSRRDSSWSETSEASYSGL

SEQ ID NO: 16712 - protein, 352 aa, Homo Sapiens
MEGISIYTSDNYTEEMGSGDYDSMKEPCFREENANFNKIFLPTIYSIIFLTGIVGNGLVILVMGYQKKLRSMTDKYRLHLSVADLLFVITLPFWAVDAVANWYFGNFLCKAVHVIYTVNLYSSVLILAFISLDRYLAIVHATNSQRPRKLLAEKVVYVGVWIPALLLTIPDFIFANVSEADDRYICDRFYPNDLWVVVFQFQHIMVGLILPGIVILSCYCIIISKLSHSKGHQKRKALKTTVILILAFFACWLPYYIGISIDSFILLEIIKQGCEFENTVHKWISITEALAFFHCCLNPILYAFLGAKFKTSAQHALTSVSRGSSLKILSKGKRGGHSSVSTESESSSFHSS

SEQ ID NO: 16713 - protein, 372 aa, Homo Sapiens
MNYPLTLEMDLENLEDLFWELDRLDNYNDTSLVENHLCPATEGPLMASFKAVFVPVAYSLIFLLGVIGNVLVLVILERHRQTRSSTETFLFHLAVADLLLVFILPFAVAEGSVGWVLGTFLCKTVIALHKVNFYCSSLLLACIAVDRYLAIVHAVHAYRHRRLLSIHITCGTIWLVGFLLALPEILFAKVSQGHHNNSLPRCTFSQENQAETHAWFTSRFLYHVAGFLLPMLVMGWCYVGVVHRLRQAQRRPQRQKAVRVAILVTSIFFLCWSPYHIVIFLDTLARLKAVDNTCKLNGSLPVAITMCEFLGLAHCCLNPMLYTFAGVKFRSDLSRLLTKLGCTGPASLCQLFPSWRRSSLSESENATSLTTF

SEQ ID NO: 16714 - protein, 342 aa, Homo Sapiens
MAEHDYHEDYGFSSFNDSSQEEHQDFLQFSKVFLPCMYLVVFVCGLVGNSLVLVISIFYHKLQSLTDVFLVNLPLADLVFVCTLPFWAYAGIHEWVFGQVMCKSLLGIYTINFYTSMLILTCITVDRFIVVVKATKAYNQQAKRMTWGKVTSLLIWVISLLVSLPQIIYGNVFNLDKLICGYHDEAISTVVLATQMTLGFFLPLLTMIVCYSVIIKTLLHAGGFQKHRSLKIIFLVMAVFLLTQMPFNLMKFIRSTHWEYYAMTSFHYTIMVTEAIAYLRACLNPVLYAFVSLKFRKNFWKLVKDIGCLPYLGVSHQWKSSEDNSKTFSASHNVEATSMFQL

SEQ ID NO: 16715 - protein, 362 aa, Homo Sapiens
MDLHLFDYSEPGNFSDISWPCNSSDCIVVDTVMCPNMPNKSVLLYTLSFIYIFIFVIGMIANSVVVWVNIQAKTTGYDTHCYILNLAIADLWVVLTIPVWVVSLVQHNQWPMGELTCKVTHLIFSINLFGSIFFLTCMSVDRYLSITYFTNTPSSRKKMVRRVVCILVWLLAFCVSLPDTYYLKTVTSASNNETYCRSFYPEHSIKEWLIGMELVSVVLGFAVPFSIIAVFYFLLARAISASSDQEKHSSRKIIFSYVVVFLVCWLPYHVAVLLDIFSILHYIPFTCRLEHALFTALHVTQCLSLVHCCVNPVLYSFINRNYRYELMKAFIFKYSAKTGLTKLIDASRVSETEYSALEQSTK

SEQ ID NO: 16716 - protein, 336 aa, Homo Sapiens
MGNCLHRAELSPSTENSSQLDFEDVWNSSYGVNDSFPDGDYGANLEAAAPCHSCNLLDDSALPFFILTSVLGILASSTVLFMLFRPLFRWQLCPGWPVLAQLAVGSALFSIVVPVLAPGLGSTRSSALCSLGYCVWYGSAFAQALLLGCHASLGHRLGAGQVPGLTLGLTVGIWGVAALLTLPVTLASGASGGLCTLIYSTELKALQATHTVACLAIFVLLPLGLFGAKGLKKALGMGPGPWMNILWAWFIFWWPHGVVLGLDFLVRSKLLLLSTCLAQQALDLLLNLAEALAILHCVATPLLLALFCHQATRTLLPSLPLPEGWSSHLDTLGSKS

SEQ ID NO: 16717 - protein, 193 aa, Homo Sapiens; identical to SEQ ID NO: 4835

SEQ ID NO: 16718 - protein, 508 aa, Homo Sapiens
MDHLGASLWPQVGSLCLLLAGAAWAPPPNLPDPKFESKAALLAARGPEELLCFTERLEDLVCFWEEAASAGVGPGNYSFSYQLEDEPWKLCRLHQAPTARGAVRFWCSLPTADTSSFVPLELRVTAASGAPRYHRVIHINEVVLLDAPVGLVARLADESGHVVLRWLPPPETPMTSHIRYEVDVSAGNGAGSVQRVEILEGRTECVLSNLRGRTRYTFAVRARMAEPSFGGFWSAWSEPVSLLTPSDLDPLILTLSLILVVILVLLTVLALLSHRRALKQKIWPGIPSPESEFEGLFTTHKGNFQLWLYQNDGCLWWSPCTPFTEDPPASLEVLSERCWGTMQAVEPGTDDEGPLLEPVGSEHAQDTYLVLDKWLLPRNPPSEDLPGPGGSVDIVAMDEGSEASSCSSALASKPSPEGASAASFEYTILDPSSQLLRPWTLCPELPPTPPHLKYLYLVVSDSGISTDYSSGDSQGAQGGLSDGPYSNPYENSLIPAAEPLPPSYVACS

SEQ ID NO: 16719 - protein, 993 aa, Homo Sapiens
MPALARDGGQLPLLVVFSAMIFGTITNQDLPVIKCVLINHKNNDSSVGKSSSYPMVSESPEDLGCALRPQSSGTVYEAAAVEVDVSASITLQVLVDAPGNISCLWVFKHSSLNCQPHFDLQNRGVVSMVILKMTETQAGEYLLFIQSEATNYTILFTVSIRNTLLYTLRRPYFRKMENQDALVCISESVPEPIVEWVLCDSQGESCKEESPAVVKKEEKVLHELFGTDIRCCARNELGRECTRLFTIDLNQTPQTTLPQLFLKVGEPLWIRCKAVHVNHGFGLTWELENKALEEGNYFEMSTYSTNRTMIRILFAFVSSVARNDTGYYTCSSSKHPSQSALVTIVEKGFINATNSSEDYEIDQYEEFCFSVRFKAYPQIRCTWTFSRKSFPCEQKGLDNGYSISKFCNHKHQPGEYIFHAENDDAQFTKMFTLNIRRKPQVLAEASASQASCFSDGYPLPSWTWKKCSDKSPNCTEEITEGVWNRKANRKVFGQWVSSSTLNMSEAIKGFLVKCCAYNSLGTSCETILLNSPGPFPFIQDNISFYATIGVCLLFIVVLTLLICHKYKKQFRYESQLQMVQVTGSSDNEYFYVDFREYEYDLKWEFPRENLEFGKVLGSGAFGKVMNATAYGISKTGVSIQVAVKMLKEKADSSEREALMSELKMMTQLGSHENIVNLLGACTLSGPIYLIFEYCCYGDLLNYLRSKREKFHRTWTEIFKEHNFSFYPTFQSHPNSSMPGSREVQIHPDSDQISGLHGNSFHSEDEIEYENQKRLEEEEDLNVLTFEDLLCFAYQVAKGMEFLEFKSCVHRDLAARNVLVTHGKVVKICDFGLARDIMSDSNYVVRGNARLPVKWMAPESLFEGIYTIKSDVWSYGILLWEIFSLGVNPYPGIPVDANFYKLIQNGFKMDQPFYATEEIYIIMQSCWAFDSRKRPSFPNLTSFLGCQLADAEEAMYQNVDGRVSECPHTYQNRRPFSREMDLGLLSPQAQVEDS

SEQ ID NO: 16720 - protein, 235 aa, Homo Sapiens
MTVLAPAWSPTTYLLLLLLLSSGLSGTQDCSFQHSPISSDFAVKIRELSDYLLQDYPVTVASNLQDEELCGGLWRLVLAQRWMERLKTVAGSKMQGLLERVNTEIHFVTKCAFQPPPSCLRFVQTNISRLLQETSEQLVALKPWITRQNFSRCLELQCQPDSSTLPPPWSPRPLEATAPTAPQPPLLLLLLLPVGLLLLAAAWCLHWQRTRRRTPRPGEQVPPVPSPQDLLLVEH

SEQ ID NO: 16721 - protein, 836 aa, Homo Sapiens; identical to SEQ ID NO: 16656

SEQ ID NO: 16722 - protein, 241 aa, Homo Sapiens; identical to SEQ ID NO: 13579

SEQ ID NO: 16723 - protein, 199 aa, Homo Sapiens; identical to SEQ ID NO: 14709

SEQ ID NO: 16724 - protein, 897 aa, Homo Sapiens; identical to SEQ ID NO: 16687

SEQ ID NO: 16725 - protein, 918 aa, Homo Sapiens; identical to SEQ ID NO: 7130

SEQ ID NO: 16726 - protein, 283 aa, Homo Sapiens; identical to SEQ ID NO: 13574

SEQ ID NO: 16727 - protein, 166 aa, Homo Sapiens; identical to SEQ ID NO: 6744

SEQ ID NO: 16728 - protein, 337 aa, Homo Sapiens
MRPTLLWSLLLLLGVFAAAAAAPPDPLSQLPAPQHPKIRLYNAEQVLSWEPVALSNSTRPVVYQVQFKYTDSKWFTADIMSIGVNCTQITATECDFTAASPSAGFPMDFNVTLRLRAELGALHSAWVTMPWFQHYRNVTVGPPENIEVTPGEGSLIIRFSSPFDIADTSTAFFCYYVHYWEKGGIQQVKGPFRSNSISLDNLKPSRVYCLQVQAQLLWNKSNIFRVGHLSNISCYETMADASTELQQVILISVGTFSLLSVLAGACFFLVLKYRGLIKYWFHTPPSIPLQIEEYLKDPTQPILEALDKDSSPKDDVWDSVSIISFPEKEQEDVLQTL

SEQ ID NO: 16729 - protein, 189 aa, Homo Sapiens; identical to SEQ ID NO: 6725

SEQ ID NO: 16730 - protein, 187 aa, Homo Sapiens; identical to SEQ ID NO: 6742

SEQ ID NO: 16731 - protein, 271 aa, Homo Sapiens
MAKVPDMFEDLKNCYSENEEDSSSIDHLSLNQKSFYHVSYGPLHEGCMDQSVSLSISETSKTSKLTFKESMVVVATNGKVLKKRRLSLSQSITDDDLEAIANDSEEEIIKPRSAPFSFLSNVKYNFMRIIKYEFILNDALNQSIIRANDQYLTAAALHNLDEAVKFDMGAYKSSKDDAKITVILRISKTQLYVTAQDEDQPVLLKEMPEIPKTITGSETNLLFFWETHGTKNYFTSVAHPNLFIATKQDYWVCLAGGPPSITDFQILENQA

SEQ ID NO: 16732 - protein, 178 aa, Homo Sapiens; identical to SEQ ID NO: 6848

SEQ ID NO: 16733 - protein, 578 aa, Homo Sapiens; identical to SEQ ID NO: 16690

SEQ ID NO: 16734 - protein, 199 aa, Homo Sapiens; identical to SEQ ID NO: 6850

SEQ ID NO: 16735 - protein, 422 aa, Homo Sapiens; identical to SEQ ID NO: 6858

SEQ ID NO: 16736 - protein, 219 aa, Homo Sapiens
MCPARSLLLVATLVLLDHLSLARNLPVATPDPGMFPCLHHSQNLLRAVSNMLQKARQTLEFYPCTSEEIDHEDITKDKTSTVEACLPLELTKNESCLNSRETSFITNGSCLASRKTSFMMALCLSSIYEDLKMYQVEFKTMNAKLLMDPKRQIFLDQNMLAVIDELMQALNFNSETVPQKSSLEEPDFYKTKIKLCILLHAFRIRAVTIDRVMSYLNAS

SEQ ID NO: 16737 - protein, 146 aa, Homo Sapiens [sequence omitted]

SEQ ID NO: 16738 - protein, 427 aa, Homo Sapiens; identical to SEQ ID NO: 6880

SEQ ID NO: 16739 - protein, 546 aa, Homo Sapiens
MKNQDKKNGAAKQSNPKSSPGQPEAGPEGAQERPSQAAPAVEAEGPGSSQAPRKPEGAQARTAQSGALRDVSEELSRQLEDILSTYCVDNNQGGPGEDGAQGEPAEPEDAEKSRTYVARNGEPEPTPVVNGEKEPSKGDPNTEEIRQSDEVGDRDHRRPQEKKKAKGLGKEITLLMQTLNTLSTPEEKLAALCKKYAELLEEHRNSQKQMKLLQKKQSQLVQEKDHLRGEHSKAVLARSKLESLCRELQRHNRSLKEEGVQRAREEEEKRKEVTSHFQVTLNDIQLQMEQHNERNSKLRQENMELAERLKKLIEQYELREEHIDKVFKHKDLQQQLVDAKLQQAQEMLKEAEERHQREKDFLLKEAVESQRMCELMKQQETHLKQQLALYTEKFEEFQNTLSKSSEVFTTFKQEMEKMTKKIKKLEKETTMYRSRWESSNKALLEMAEEKTVRDKELEGLQVKIQRLEKLCRALQTERNDLNKRVQDLSAGGQGSLTDSGPERRPEGPGAQAPSSPRVTEAPCYPGAPSTEASGQTGPQEPTSARA

SEQ ID NO: 16740 - protein, 162 aa, Homo Sapiens
MRISKPHLRSISIQCYLCLLLNSHFLTEAGIHVFILGCFSAGLPKTEANWVNVISDLKKIEDLIQSMHIDATLYTESDVHPSCKVTAMKCFLLELQVISLESGDASIHDTVENLIILANNSLSSNGNVTESGCKECEELEEKNIKEFLQSFVHIVQMFINTS

SEQ ID NO: 16741 - protein, 267 aa, Homo Sapiens; identical to SEQ ID NO: 6891

SEQ ID NO: 16742 - protein, 1332 aa, Homo Sapiens
MESHSRAGKSRKSAKFRSISRSLMLCNAKTSDDGSSPDEKYPDPFEISLAQGKEGIFHSSVQLADTSEAGPSSVPDLALASEAAQLQAAGNDRGKTCRRIFFMKESSTASSREKPGKLEAQSSNFLFPKACHQRARSNSTSVNPYCTREIDFPMTKKSAAPTDRQPYSLCSNRKSLSQQLDCPAGKAAGTSRPTRSLSTAQLVQPSGGLQASVISNIVLMKGQAKGLGFSIVGGKDSIYGPIGIYVKTIFAGGAAAADGRLQEGDEILELNGESMAGLTHQDALQKFKQAKKGLLTLTVRTRLTAPPSLCSHLSPPLCRSLSSSTCITKDSSSFALESPSAPISTAKPNYRIMVEVSLQKEAGVGLGIGLCSVPYFQCISGIFVHTLSPGSVAHLDGRLRCGDEIVEISDSPVHCLTLNEVYTILSHCDPGPVPIIVSRHPDPQVSEQQLKEAVAQAVENTKFGKERHQWSLEGVKRLESSWHGRPTLEKEREKNSAPPHRRAQKVMIRSSSDSSYMSGSPGGSPGSGSAEKPSSDVDISTHSPSLPLAREPVVLSIASSRLPQESPPLPESRDSHPPLRLKKSFEILVRKPMSSKPKPPPRKYFKSDSDPQKSLEERENSSCSSGHTPPTCGQEARELLPLLLPQEDTAGRSPSASAGCPGPGIGPQTKSSTEGEPGWRRASPVTQTSPIKHPLLKRQARMDYSFDTTAEDPWVRISDCIKNLFSPIMSENHGHMPLQPNASLNEEEGTQGHPDGTPPKLDTANGTPKVYKSADSSTVKKGPPVAPKPAWFRQSLKGLRNRASDPRGLPDPALSTQPAPASREHLGSHIRASSSSSSIRQRISSFETFGSSQLPDKGAQRLSLQPSSGEAAKPLGKHEEGRFSGLLGRGAAPTLVPQQPEQVLSSGSPAASEARDPGVSESPPPGRQPNQKTLPPGPDPLLRLLSTQAEESQGPVLKMPSQRARSFPLTRSQSCETKLLDEKTSKLYSISSQVSSAVMKSLLCLPSSISCAQTPCIPKEGASPTSSSNEDSAANGSAETSALDTGFSLNLSELREYTEGLTEAKEDDDGDHSSLQSGQSVISLLSSEELKKLIEEVKVLDEATLKQLDGIHVTILHKEEGAGLGFSLAGGADLENKVITVHRVFPNGLASQEGTIQKGNEVLSINGKSLKGTTHHDALAILRQAREPRQAVIVTRKLTPEAMPDLNSSTDSAASASAASDVSVESTAEATVCTVTLEKMSAGLGFSLEGGKGSLHGDKPLTINRIFKGAASEQSETVQPGDEILQLGGTAMQGLTRFEAWNIIKALPDGPVTIVIRRKSLQSKETTAAGDS

SEQ ID NO: 16743 - protein, 155 aa, Homo Sapiens; identical to SEQ ID NO: 6899

SEQ ID NO: 16744 - protein, 866 aa, Homo Sapiens; identical to SEQ ID NO: 6906

SEQ ID NO: 16745 - protein, 193 aa, Homo Sapiens
MAAEPVEDNCINFVAMKFIDNTLYFIAEDDENLESDYFGKLESKLSVIRNLNDQVLFIDQGNRPLFEDMTDSDCRDNAPRTIFIISMYKDSQPRGMAVTISVKCEKISTLSCENKIISFKEMNPPDNIKDTKSDIIFFQRSVPGHDNKMQFESSSYEGYFLACEKERDLFKLILKKEDELGDRSIMFTVQNED

SEQ ID NO: 16746 - protein, 569 aa, Homo Sapiens; identical to SEQ ID NO: 6962

SEQ ID NO: 16747 - protein, 271 aa, Homo Sapiens; identical to SEQ ID NO: 16731

SEQ ID NO: 16748 - protein, 269 aa, Homo Sapiens
MAEVPELASEMMAYYSGNEDDLFFEADGPKQMKCSFQDLDLCPLDGGIQLRISDHHYSKGFRQAASVVVAMDKLRKMLVPCPQTFQENDLSTFFPFIFEEEPIFFDTWDNEAYVHDAPVRSLNCTLRDSQQKSLVMSGPYELKALHLQGQDMEQQVVFSMSFVQGEESNDKIPVALGLKEKNLYLSCVLKDDKPTLQLESVDPKNYPKKKMEKRFVFNKIEINNKLEFESAQFPNWYISTSQAENMPVFLGGTKGGQDITDFTMQFVSS

SEQ ID NO: 16749 - protein, 153 aa, Homo Sapiens; identical to SEQ ID NO: 6997

SEQ ID NO: 16750 - protein, 176 aa, Homo Sapiens; identical to SEQ ID NO: 6998

SEQ ID NO: 16751 - protein, 553 aa, Homo Sapiens; identical to SEQ ID NO: 7004

SEQ ID NO: 16752 - protein, 311 aa, Homo Sapiens
MQTFTMVLEEIWTSLFMWFFYALIPCLLTDEVAILPAPQNLSVLSTNMKHLLMWSPVIAPGETVYYSVEYQGEYESLYTSHIWIPSSWCSLTEGPECDVTDDITATVPYNLRVRATLGSQTSAWSILKHPFNRNSTILTRPGMEITKDGFHLVIELEDLGPQFEFLVAYWRREPGAEEHVKMVRSGGIPVHLETMEPGAAYCVKAQTFVKAIGRYSAFSQTECVEVQGEAIPLVLALFAFVGFMLILVVVPLFVWKMGRLLQYSCCPVVVLPDTLKITNSPQKLISCRREEVDACATAVMSPEELLRAWIS

SEQ ID NO: 16753 - protein, 155 aa, Homo Sapiens
MERIVICLMVIFLGTLVHKSSSQGQDRHMIRMRQLIDIVDQLKNYVNDLVPEFLPAPEDVETNCEWSAFSCFQKAQLKSANTGNNERIINVSIKKLKRKPPSTNAGRRQKHRLTCPSCDSYEKKPPKEFLERFKSLLQKMIHQHLSSRTHGSEDS

SEQ ID NO: 16754 - protein, 152 aa, Homo Sapiens; identical to SEQ ID NO: 7032

SEQ ID NO: 16755 - protein, 229 aa, Homo Sapiens; identical to SEQ ID NO: 4493

SEQ ID NO: 16756 - protein, 153 aa, Homo Sapiens [sequence omitted]

SEQ ID NO: 16757 - protein, 825 aa, Homo Sapiens; identical to SEQ ID NO: 7097

SEQ ID NO: 16758 - protein, 134 aa, Homo Sapiens; identical to SEQ ID NO: 7105

SEQ ID NO: 16759 - protein, 420 aa, Homo Sapiens; identical to SEQ ID NO: 7108

SEQ ID NO: 16760 - protein, 212 aa, Homo Sapiens; identical to SEQ ID NO: 7120

SEQ ID NO: 16761 - protein, 468 aa, Homo Sapiens; identical to SEQ ID NO: 7125

SEQ ID NO: 16762 - protein, 177 aa, Homo Sapiens; identical to SEQ ID NO: 7141

SEQ ID NO: 16763 - protein, 521 aa, Homo Sapiens
MGLGRCIWEGWTLESEALRRDMGTWLLACICICTCVCLGVSVTGEGQGPRSRTFTCLTNNILRIDCHWSAPELGQGSSPWLLFTSNQAPGGTHKCILRGSECTVVLPPEAVLVPSDNFTITFHHCMSGREQVSLVDPEYLPRRHVKLDPPSDLQSNISSGHCILTWSISPALEPMTTLLSYELAFKKQEEAWEQAQHRDHIVGVTWLILEAFELDPGFIHEARLRVQMATLEDDVVEEERYTGQWSEWSQPVCFQAPQRQGPLIPPWGWPGNTLVAVSIFLLLTGPTYLLFKLSPRVKRIFYQNVPSPAMFFQPLYSVHNGNFQTWMGAHGAGVLLSQDCAGTPQGALEPCVQEATALLTCGPARPWKSVALEEEQEGPGTRLPGNLSSEDVLPAGCTEWRVQTLAYLPQEDWAPTSLTRPAPPDSEGSRSSSSSSSSNNNNYCALGCYGGWHLSALPGNTQSSGPIPALACGLSCDHQGLETQQGVAWVLAGHCQRPGLHEDLQGMLLPSVLSKARSWTF

SEQ ID NO: 16764 - protein, 202 aa, Homo Sapiens; identical to SEQ ID NO: 7856

SEQ ID NO: 16765 - protein, 1097 aa, Homo Sapiens; identical to SEQ ID NO: 7860

SEQ ID NO: 16766 - protein, 240 aa, Homo Sapiens
MEESVVRPSVFVVDGQTDIPFTRLGRSHRRQSCSVARVGLGLLLLLMGAGLAVQGWFLLQLHWRLGEMVTRLPDGPAGSWEQLIQERRSHEVNPAAHLTGANSSLTGSGGPLLWETQLGLAFLRGLSYHDGALVVTKAGYYYIYSKVQLGGVGCPLGLASTITHGLYKRTPRYPEELELLVSQQSPCGRATSSSRVWWDSSFLGGVVHLEAGEKVVVRVLDERLVRLRDGTRSYFGAFMV

SEQ ID NO: 16767 - protein, 435 aa, Homo Sapiens; identical to SEQ ID NO: 8143

SEQ ID NO: 16768 - protein, 244 aa, Homo Sapiens
MGALGLEGRGGRLQGRGSLLLAVAGATSLVTLLLAVPITVLAVLALVPQDQGGLVTETADPGAQAQQGLGFQKLPEEEPETDLSPGLPAAHLIGAPLKGQGLGWETTKEQAFLTSGTQFSDAEGLALPQDGLYYLYCLVGYRGRAPPGGGDPQGRSVTLRSSLYRAGGAYGPGTPELLLEGAETVTPVLDPARRQGYGPLWYTSVGFGGLVQLRRGERVYVNISHPDMVDFARGKTFFGAVMVG

SEQ ID NO: 16769 - protein, 554 aa, Homo Sapiens; identical to SEQ ID NO: 3577

SEQ ID NO: 16770 - protein, 401 aa, Homo Sapiens; identical to SEQ ID NO: 13563

SEQ ID NO: 16771 - protein, 252 aa, Homo Sapiens; identical to SEQ ID NO: 9855

SEQ ID NO: 16772 - protein, 979 aa, Homo Sapiens; identical to SEQ ID NO: 9857

SEQ ID NO: 16773 - protein, 277 aa, Homo Sapiens
MCVGARRLGRGPCAALLLLGLGLSTVTGLHCVGDTYPSNDRCCHECRPGNGMVSRCSRSQNTVCRPCGPGFYNDVVSSKPCKPCTWCNLRSGSERKQLCTATQDTVCRCRAGTQPLDSYKPGVDCAPCPPGHFSPGDNQACKPWTNCTLAGKHTLQPASNSSDAICEDRDPPATQPQETQGPPARPITVQPTEAWPRTSQGPSTRPVEVPGGRAVAAILGLGLVLGLLGPLAILLALYLLRRDQRLPPDAHKPPGGGSFRTPIQEEQADAHSTLAKI

SEQ ID NO: 16774 - protein, 183 aa, Homo Sapiens
MERVQPLEENVGNAARPRFERNKLLLVASVIQGLGLLLCFTYICLHFSALQVSHRYPRIQSIKVQFTEYKKEKGFILTSQKEDEIMKVQNNSVIINCDGFYLISLKGYFSQEVNISLHYQKDEEPLFQLKKVRSVNSLMVASLTYKDKVYLNVTTDNTSLDDFHVNGGELILIHQNPGEFCVL

SEQ ID NO: 16775 - protein, 616 aa, Homo Sapiens; identical to SEQ ID NO: 13557

SEQ ID NO: 16776 - protein, 273 aa, Homo Sapiens
MKKTQTWILTCIYLQLLLFNPLVKTEGICRNRVTNNVKDVTKLVANLPKDYMITLKYVPGMDVLPSHCWISEMVVQLSDSLTDLLDKFSNISEGLSNYSIIDKLVNIVDDLVECVKENSSKDLKKSFKSPEPRLFTPEEFFRIFNRSIDAFKDFVVASETSDCVVSSTLSPEKDSRVSVTKPFMLPPVAASSLRNDSSSSNRKAKNPPGDSSLHWAAMALPALFSLIIGFAFGALYWKKRQPSLTRAVENIQINEEDNEISMLQEKEREFQEV

SEQ ID NO: 16777 - protein, 293 aa, Homo Sapiens
MSGLGRSRRGGRSRVDQEERFPQGLWTGVAMRSCPEEQYWDPLLGTCMSCKTICNHQSQRTCAAFCRSLSCRKEQGKFYDHLLRDCISCASICGQHPKQCAYFCENKLRSPVNLPPELRRQRSGEVENNSDNSGRYQGLEHRGSEASPALPGLKLSADQVALVYSTLGLCLCAVLCCFLVAVACFLKKRGDPCSCQPRSRPRQSPAKSSQDHAMEAGSPVSTSPEPVETCSFCFPECRAPTQESAVTPGTPDPTCAGRWGCHTRTTVLQPCPHIPDSGLGIVCVPAQEGGPGA

SEQ ID NO: 16778 - protein, 285 aa, Homo Sapiens
MDDSTEREQSRLTSCLKKREEMKLKECVSILPRKESPSVRSSKDGKLLAATLLLALLSCCLTVVSFYQVAALQGDLASLRAELQGHHAEKLPAGAGAPKAGLEEAPAVTAGLKIFEPPAPGEGNSSQNSRNKRAVQGPEETVTQDCLQLIADSETPTIQKGSYTFVPWLLSFKRGSALEEKENKILVKETGYFFIYGQVLYTDKTYAMGHLIQRKKVHVFGDELSLVTLFRCIQNMPETLPNNSCYSAGIAKLEEGDELQLAIPRENAQISLDGDVTFFGALKLL

SEQ ID NO: 16779 - protein, 503 aa, Homo Sapiens; identical to SEQ ID NO: 13181

SEQ ID NO: 16780 - protein, 567 aa, Homo Sapiens; identical to SEQ ID NO: 14646

SEQ ID NO: 16781 - protein, 851 aa, Homo Sapiens; identical to SEQ ID NO: 13184

SEQ ID NO: 16782 - protein, 390 aa, Homo Sapiens
MPPSGLRLLLLLLPLLWLLVLTPGRPAAGLSTCKTIDMELVKRKRIEAIRGQILSKLRLASPPSQGEVPPGPLPEAVLALYNSTRDRVAGESAEPEPEPEADYYAKEVTRVLMVETHNEIYDKFKQSTHSIYMFFNTSELREAVPEPVLLSRAELRLLRLKLKVEQHVELYQKYSNNSWRYLSNRLLAPSDSPEWLSFDVTGVVRQWLSRGGEIEGFRLSAHCSCDSRDNTLQVDINGFTTGRRGDLATIHGMNRPFLLLMATPLERAQHLQSSRHRRALDTNYCFSSTEKNCCVRQLYIDFRKDLGWKWIHEPKGYHANFCLGPCPYIWSLDTQYSKVLALYNQHNPGASAAPCCVPQALEPLPIVYYVGRKPKVEQLSNMIVRSCKCS

SEQ ID NO: 16783 - protein, 414 aa, Homo Sapiens; identical to SEQ ID NO: 13160

SEQ ID NO: 16784 - protein, 412 aa, Homo Sapiens; identical to SEQ ID NO: 13162

SEQ ID NO: 16785 - protein, 233 aa, Homo Sapiens; identical to SEQ ID NO: 16534

SEQ ID NO: 16786 - protein, 205 aa, Homo Sapiens; identical to SEQ ID NO: 8093

SEQ ID NO: 16787 - protein, 933 aa, Homo Sapiens; identical to SEQ ID NO: 13682

SEQ ID NO: 16788 - protein, 635 aa, Homo Sapiens
MPSWALFMVTSCLLLAPQNLAQVSSQDVSLLASDSEPLKCFSRTFEDLTCFWDEEEAAPSGTYQLLYAYPREKPRACPLSSQSMPHFGTRYVCQFPDQEEVRLFFPLHLWVKNVFLNQTRTQRVLFVDSVGLPAPPSIIKAMGGSQPGELQISWEEPAPEISDFLRYELRYGPRDPKNSTGPTVIQLIATETCCPALQRPHSASALDQSPCAQPTMPWQDGPKQTSPSREASALTAEGGSCLISGLQPGNSYWLQLRSEPDGISLGGSWGSWSLPVTVDLPGDAVALGLQCFTLDLKNVTCQWQQQDHASSQGFFYHSRARCCPRDRYPIWENCEEEEKTNPGLQTPQFSRCHFKSRNDSIIHILVEVTTAPGTVHSYLGSPFWIHQAVRLPTPNLHWREISSGHLELEWQHPSSWAAQETCYQLRYTGEGHQDWKVLEPPLGARGGTLELRPRSRYRLQLRARLNGPTYQGPWSSWSDPTRVETATETAWISLVTALHLVLGLSAVLGLLLLRWQFPAHYRRLRHALWPSLPDLHRVLGQYLRDTAALSPPKATVSDTCEEVEPSLLEILPKSSERTPLPLCSSQAQMDYRRLQPSCLGTMPLSVCPPMAESGSCCTTHIANHSYLPLSYWQQP

SEQ ID NO: 16789 - protein, 281 aa, Homo Sapiens [sequence omitted]

SEQ ID NO: 16790 - protein, 468 aa, Homo Sapiens; identical to SEQ ID NO: 16514

SEQ ID NO: 16791 - protein, 440 aa, Homo Sapiens; identical to SEQ ID NO: 16515

SEQ ID NO: 16792 - protein, 317 aa, Homo Sapiens; identical to SEQ ID NO: 13609

SEQ ID NO: 16793 - protein, 249 aa, Homo Sapiens; identical to SEQ ID NO: 13611

SEQ ID NO: 16794 - protein, 114 aa, Homo Sapiens; identical to SEQ ID NO: 14356

SEQ ID NO: 16795 - protein, 114 aa, Homo Sapiens; identical to SEQ ID NO: 14357

SEQ ID NO: 16796 - protein, 594 aa, Trichoplusia ni; identical to SEQ ID NO: 14487

SEQ ID NO: 16797 - DNA, 2488 bp, Ctenoplusia agnata
ccctagaagcccaatctacgtcattctgacgtgtatgtcgccgaaaatactctgtctctttctcctgcacgatcggattgccgcgaacgctcgattcaacccagttggcgccgagatctattggaggactgcggcgttgattcggtaagtcccgccattttgtcatagtaacagtattgcacgtcagcttgacgtatatttgggctttgtgttatttttgtaaattttcaacgttagtttattattgcatctttttgttacattactggtttatttgcatgtattactcaaatattatttttattttagcgtagaaaatacaatggcgtctcgtcaacatttataccaggatgaaatagcagcaatactggaaaatgaagatgattattctcctcacgataccgactctgaaatggaagattgtgttacccaagatgatgtcaggagtgacgttgaagacgagatggtggataatattggcaatggtacgagtccagcaagtaggcacgaggatcctgagacccctgacccgtcatcagaagcttctaatcttgaggtaactttatcttcacacagaattattatattacctcagcgttcgattcgtgaaaagaataatcacatttggtctacaacaaaaggtcagtcttctggtaggactgctgctataaatattgtacgtaccaatagaggacctactcgaatgtgtagaaacattgtcgatccattactctgctttcaactttttataaaagaagagattgttgaggaaattgtcaagtggacaaacgtggaaatggtacaaaaacgtgtaaacctgaaggacatctcagcaagttatagggataccaatgaaatggaaatctgggctattataagtatgctcaccttatcggccgttatgaaagacaatcatctgtctactgacgagttgttcaatgtctcctatggcactcgatacgtttcagtaatgagtcgagagagatttgaatttctattgcgattattgagaatgggtgataaattactgagaccaaatttacgccaagaggatgctttcacacctgtgagaaaaatatgggagatttttatcaaccaatgtagactgaattacgtacctggcactaacttgactgtcgatgaacagttgttaggttttcgcggccgttgtcctttccggatgtatattccgaacaaaccggacaaatatggtattaaatttcctatggtatgtgatgctgctacaaagtacatggtagatgctatcccttatctaggcaaaagcactaagacacaaggtctgccattaggcgagttttatgtgaaggagctgactcaaacagtacacggaacaaacagaaatgtcacttgtgacaactggttcacgtctgttccattagctaagagtttgctaaacagtccatataatttaacgctagtgggaaccatcaggtcaaacaagagggagataccagaagaagtcaagaactcacgttcgcggcaggtaggttcgtcaatgttttgttttgatggccctctgacattagtttcctataaacccaagccgtcaaagatggtattcttattatcatcatgtaatgaagatgccgtggtcaatcaaagtaatgggaagccggatatgatattattttacaatcagaccaaaggaggtgttgattcatttgaccagatgtgttcatctatgtcgacaaataggaagactaataggtggcctatggcagtcttttacggcatgttgaatatggcatttgtcaattcctacattatatactgccataacatgttggctaaaaaagaaaaacctctaagtcgcaaagattttatgaaaaaattaagcacagacttgacaacaccgtcgatgcaaaaacgtctggaggctcctactttgaagcggtccttacgtgataacataacaaatgttttaaaaattgtaccacaggcagccatagatacttcatttgatgaaccagagccgaagaaaaggcgctattgtggattttgctcatataaaaaaaagagaatgacaaagacacagtgcttcaagtgcaaaaaaccagtatgtggagagcacaatattgatgtttgtcaagactgcatataaagactgttttttttgtatttgcattatatattatattctaaagttgatttaattctaagaaaaacattaaaataagtttctttttgtaaaatttaattaattataagaaaaagtttaagttgatctcattttttataaaaatttgcaatgtttccaaagttattattgtaaaagaataaataaaagtaaactgagttttaattgatgttttattatatcattatactatatattacttaaataaaacaataactgaatgtatttctaaaaggaatcactagaaaatatagtgatcaaaaatttacacgtcatttttgcgtatgattgggctttataggttctaaaaatatgattgggcctctaggg

SEQ ID NO: 16798 - protein, 591 aa, Anopheles gambiae
MGDAMHVQWLSEETEEVPENEEDMLYEDVEYIEEYVHFPDGPESNVSGSVAVQNEESTGHVIKIESIDHAFDMLQNSVWSIKPPERTGTMGRKVAHPRPAPVGLAKSAKSPAECLSLFLDADVIAMITEYTNEQIKAEQPNYARERDANPTDEMEIMALLGVLYIAGTVRDGRENIERLFDTKMGTGLEAVYLTMTSLRYHFLIRSIRFDDPTAAPDEIEGDKLAPIRPIYERIVSNCQKYLRPGRFLMLDEQAVQFKGKCEFRQILPSAPGRAGFRFHLLVDCETSYVSNLEICVPENQNPYNLSYAPTDVAMRLTEPVQGRQKTVILGAGLTSIDLIEKLYASRTMAMGEVPKSYPDLPKALIANKGRPEHSTLAAYHDPATLVSYVTRRKEVMLLMSSFVDFDSEEQAGEQDEGEQHLKLVELYNRTKTTIRTIQQMCAKHNVVRSTRRWPVAVFFNLMNLSAINAWCIYCLNHPEEAKMSRRDFLVTMALELLRPQARRRLDSKTLPRLLRQRIGLFLGISREEYETVPVVERQGGESRGRCYLCGRARNKTTRISCHSCGKYTCNAHCAQLCRTCYMDDCASEQQE

SEQ ID NO: 16799 - protein, 565 aa, Anopheles gambiae
MADNLNNIPNCFPNNEDSSSDSDHDAKSDESDMENNIEEVMQASIMEELDEDSQEQATGRCVNALEARSSWKPWAGKQKPFPFFRKKRLRVDLPAKSTPYEIFSLILDDKLVAHIALAMNLYMEKKNAQKSKASKWLETNPKEVRKFIGLMIWMDLVRVGRLEDYWSESALYNFAVPRAAMYRERFRALLGAFCFYDDGTSKTDYKEPGKIGAFIDVLQSKFQALLHLGEDVVVREMLALGRDRTSFKQYIPASAHRHGRWALFKLCSLEGYTWGLKLCTEQRLIGEAQLANSVCMELCEPLLNQGRTVYIDNFHASFDLAQALLANQTHLVGTVRVNGSSMPKDVLLAKLRKGEIIARENDDGVMVLKWKGTCTMGLLSTKHSPALVPMESQVRSNRRWIRVARIQPEAVIAHIQAKGRPDRSDAIGPHITDLRKGMKWYKQVGLVLLLQVCVTNAWILHRMVTKKKLKLATFREQLVDQLVPLPNPTVERGLSGGEKKYTHHLEVRTDGNGRTVRRSCANCYAESRKTMSHYEAGRNKKATTTFCGSCPKQPQLCMPCFNKLH

SEQ ID NO: 16800 - protein, 500 aa, Anopheles gambiae
MFPLPSNCDPVFTMAALGPYVVIEPLDSEYVVNDTGPAACAEATPNTDGGGEPEQQSDDDDLICLWEEPQTFGIFDEPVGTNVPFDGADERTASEYAALVCDDALFDILVKGTNRHRKQWADCMRAGGQSVEPYRKVTVAEMKRYVGLLLVMGQVRKDCQHCYWSTNPLLETPVFANTMSYKRFQQISHYFHGMKQANRTYDAKPVLDHLVPKFQALYAPKQQLIVSELTIPQDVLNGQQTEPPNHSEDAQGSTPESAKRLRLLCESDTGYVLNVELANQQLDQVALTDVSIVRPYFGRWHHVYWGNDGITVAAAETLYANQTLACGTLRNDPDGTVAPERKSPVLVMDGQGKRILSTIHGAAAMQPTEGEPQGPPPACVADLNRHLADLERFEGLLVEEYLSNASVGWHIRTVLLLINVALLNAYILFSQTDTGSRFTFNVFRLAVAREWVGASEPLEEPTKFLPLIRGRKRKFLPLIPGRKRKETGLHNRVPKHPARN

SEQ ID NO: 16801 - protein, 577 aa, Aphis gossypii
MTVEQIRSLLQDISTETDCVDDQESDSDLSIEDVEVSDHESNSEQDFSDNESDLETSLGDSTFYIGKDKITKWQLKEFTTSKIRQHNIVNVVPGPKECARNIVSEIDAFLKIIDLDMIDEIVTCTNMYISNMRQRVQYSRPRDCLDTSRCEILAYFGLLFLIGIKKAHHANVKELWSADGSGTEITRATMSYKRFLFLCRCLRFDDRGTRAERRVIDKLSPIRTTFDLFLKNINKNYNLSEYTTIDEMLHPFRGRCQWIQYIPSKPAKYGIKMFALCDAKTFYTSKIEIYVGKQPPGPYEVSNSPIDIVKRLVTPIENSKRNLTTDNWYTSIPLADYLLQKKITLTGTLKKNKREIPTEFLPHKKKEVGSSVFGFQKNKTLVSYVPRKNKAVILLSTMHHDSKIDVETRKPEIIIDYNCTKGGVDTVDKMCAAYSVSRITKRWPLVIFYSLMNIAGINAQVLFSYSKHNNAPKIRRLFLKTLAFDLMKEHLAFRAQISSLPSDISSFLKIKYAVPSTSDVSTTPPSKRGTCFECGRKKNAATSMKCTKCMRFVCKLHSKKIIICEKCSNNDDNGNSE

SEQ ID NO: 16802 - DNA, 2634 bp, Aphis gossypii
ccttccagcgggcgcgctgttgtaaataatacaacagttttatatttattggtttattcaatttttattctatttttatcttatcggcggtcatgggtattcctctataatgttattatctacgttttagactatttttgaagtgtttcagttcattgtattgcagacaatcgacgaagtacttatagtgttgtcacaaaatacaacacgcgccattccgtgtacctacgccaaacacaaaacgcgtgttcggtgtacgcatcgttcgtcgtatctgacttattattttgtaatttttatttttgtgtggtaataaaaacaaaaatatgtaagtattgttttatatcactatgcaatatataatatatacattttaatttttcttacaatatgttttttttattatttgtatacgccaaacacaaaacgcgtgttcggtgtacgcatcgttcgtcgtatctgacttattattttgtaatttttatttttgtgtggtaataaaaacaaaaatatgtaagtattgttttatatcactatgcaatatataatatatacattttaatttttcttacaatatgttttttttattatttgtatacgtttttggtacgtactaataatcgatattatttatacaatgtcttaggtcggatcatatgacagttgaacaaattcgaagtttactgcaagacatttcaactgaaacagattgtgttgatgaccaggagagtgatagtgatctaagtatcgaagatgtggaggtaagtgaccacgaaagcaattctgaacaagatttttcagacaatgaatcagatctagagactagtttgggggacagtacattctacataggaaaagataaaataactaaatggcaactaaaagagtttacaacttcaaaaattaggcaacataatatagtaaacgtagttcctggtccaaaggagtgcgctagaaatattgttagtgagatagatgcatttctaaaaataattgatcttgacatgattgacgaaatcgtaacgtgcactaacatgtatattagtaatatgagacaacgagttcaatactctagaccccgagactgcttagatacttcaaggtgtgaaatactggcttattttggacttttatttttgattggtataaagaaagctcatcatgctaatgtaaaagaattatggtcggcggatggttctggtacagaaataactagggccactatgagctacaaaagatttttgtttttatgtcgctgcctcagatttgacgatcgcggaactagagctgaaagacgggtgattgataaactgtctcctattcgtactacgtttgacctttttttgaaaaatatcaataagaattataatttgagtgaatatactactattgacgaaatgttacacccatttcgtggtcggtgtcaatggatacagtatatcccaagtaaaccggccaaatatggcatcaaaatgtttgcattatgtgatgcaaaaacattttacacgagtaaaatagagatttatgttggaaaacaaccacctggtccgtatgaggtttctaattcaccaattgatatcgtaaaacgattagtaacacccatcgaaaactctaaacgaaatcttaccactgacaactggtataccagtattccacttgcagattacttattacaaaaaaaaattactctaactggaactttgaaaaaaaacaagcgagaaatacctacagaatttttaccacataaaaaaaaagaagttggttcgagcgtgttcgggtttcaaaaaaataaaacgttagtgtcatacgtacctcgaaaaaacaaggcagttattttgctttcaactatgcaccatgattcaaaaattgatgtagaaactcgtaaaccagaaataattatagattataattgtaccaaaggtggagttgatacagtagataaaatgtgcgcggcatattctgtctctagaattacaaaaaggtggccacttgtaattttttattctttgatgaatattgctggaataaatgctcaggtactgttttcatactctaaacataacaatgcccctaaaattagaagattatttttgaaaacattggcatttgatctaatgaaggaacatcttgcttttcgagctcaaatctcaagtttaccatcggacatatcatcttttttgaaaataaaatatgctgttccaagtacatcagatgtatctacaacccccccttcaaaacgaggaacttgcttcgaatgcgggagaaaaaaaaatgcggctacatctatgaagtgcaccaagtgtatgcgatttgtatgtaagctacattcaaaaaaaattattatttgtgaaaagtgttctaataacgatgacaatggcaattctgaataatttcttactgtaaacaaatactaaaaataattttaatttttgatgtaataataataagacgtattgattttttaataaaacataattataatagtatttaaataaaaacaactttgtgaacgtacctattgtttattttattattagatataatatgtacgactatcacagcatattaggactgttgtaaaatttacaacgcgcgactactcttgtttcaaataatggcgcgcccgctggaagg

SEQ ID NO: 16803 - protein, 545 aa, Acyrthosiphon pisum
MISDEDILLHLDEIIANEDEFIDDINFDIENNDIEVTELEVTDPPSPDHSPIVQRNFRPKEHYFDSSKCGVQKHEFGLNSNSSKLEFFKAFVSEFLLGKVAFETNRYAKQYIQSNEISHQSRVNAWKDTNVDEMYTFLATTILMSRNKKLDMKDYWSTDPLLSSPIFRQIISRNRYLLLHQMLHFCNNENQEKGNRLFKLDVVLDEIRTNFKAGMVPFQNIVIDESLVLWKGRLSFKQFIKTKRHRFGIKFFVLCDVETDFILDFIIYTGTETRLLPYDANIGISGAVVKTLIAPYLNKGYNLYTDNWYTSPILAQYLYKKKTTITGTVRKNRRGMPELKNKLAVGDVQSAHSKNIMVLKWVDRREVFMLSTKFDSNLDNSGKFDRKGNLVKKPICVINYNQCMGSIDKTDMLLSSVECVRKTSKCILNAFSAFKTVTGQNMPLANFQLEVIRQLLEKYGGNTVSPRGRPCTKDQPFRLSARHFPSDVKKLASGKVQRRKCIVCTRNNKRKDTMYMCQECDVGLCATPCFAIYHTKQNYLAVQLF

SEQ ID NO: 16804 - DNA, 2476 bp, Agrotis ipsilon
ccctagaagcccaatctacgtaaatttgacgtataccgcggcgaaatatatctgtctctttcacgtttaccgtcggattcccgctaacttcggaaccaactcagtagccattgagaactcccaggacacagttgcgtcatctcggtaagtgccgccattttgttgtaatagacaggttgcacgtcattttgacgtataattgggctttgtgtaacttttgaaattatttataatttttattgatgtgatttatttgagttaatcgtattgtttcgttacatttttcatatgatattaatattttcagattgaatataaaatggagtcccgtcaacggctaaaccaggacgaaatagctacaattttagaaaatgatgacgattattctccactggattcggactccgaggcagaagatcgtgtagttgaagatgatgtctggagtgataacgaggacgcgatgatcgactacgttgaagatacaagcaggcaagaggaccccgataacaatattgcttctcaggaatcggctaatcttgaggtaacttcgttgacttcacaccgaataattagtttgcctcagcggtcaatatgtggaaaaaacaaccatgtatggtcaactacaaagggacgtacgacgggcaggacttctgctatcaatataatacgcacaaataggggaccaacgcgaatgtgtcgcaatattgttgatccattgctttgttttcaactttttataacggatgagataattcatgaaatagttaagtggacaaacgtcgagatgatagtaaaacgtcaaaatttgatagacatttcagcaagctacagggatacaaatacaatggagatgtgggcgttagtcggcattctcactctgacggcagttatgaaagataaccacttatcaactgatgagttgtttgacgctacattctctggcaccagatacgtatcagtaatgagccgagagagattcgaattcctaataagatgtatgagaatggacgacaaaacactgcgaccaactcttcgtagcgatgatgcttttataccggtgagaaaactatgggagatttttatcaatcaatgcagactaaactacgttcctggcggtaacttgactgtagatgagcaattgttgggttttcgcggccgttgtccattccggatgtatattcccaacaaacctgataaatatggcataagattccccatgatgtgtgacgctgccacaaagtacatgatagatgccataccgtaccttggtaaaagtacaaaaacaaatggtttaccactgggcgagttttatgtaaaagagctgactaaaacagtacacggcacaaatagaaatgttacctgcgacaactggttcacgtctatcccattagcgaagaacatgctccaggctccatacaacctaacaatagtaggaaccatcaggtctaacaaaagagaaatacctgaagagatcaagaattctcgatcacggccggtaggatcctcaatgttttgctttgatggccctttgaccttggtttcgtataaaccaaagccgtcaagaatggtatttttattgtcttcctgtgatgaaaatgccgttatcaatgaaagtaacggaaaaccggacatgatattgttttataatcaaacaaaaggcggtgttgattcctttgaccagatgtgtaagtctatgtctgctaacaggaaaactaataggtggccgatggcggtcttttatggcatgttgaatatggcgtttgtgaattcctatataatatactgtcacaataagataaataaacaaaaaaaaccgataaaccgcaaagaatttatgaaaaatttaagtacagatctgacgacaccttggatgcaagaacgactaaaagcacctactttgaagaggactctacgcgacaatataacaaatgttttaaaaaatgtggtaccgccatctccggctaataatagtgaggagccaggaccaaagaaacgaagctattgtggattttgttcatataaaaaaaggcggatgaccaagacgcagttttacaaatgcaaaaaggctatatgtggagaacacaatattgacgtttgtcaagactgtgtataaagactgttttttttaaaaggcttataaagtattactattgcgtgatttaattttataaaaatatttaaaaccagttgatttttttaataattacctaattttaagaaaaaatgttagaagcttgatatttttgttgatttttttctaagatttgattaaaaggccataattgtattaataaagagtatttttaacttcaaatttattttatttattaattaaaacttcaattatgataatacatgcaaaaatatagttcatcaacagaaaaatataggaaaactctaatagttttatttttacacgtcatttttacgtatgattgggctttatagctagtcaaatatgattgggcttctaggg

SEQ ID NO: 16805 - protein, 505 aa, Chilo suppressalis
MIQGQIMVSDTEEEPSDSTGRTKRRRTYAWRKRDLAKNPVNWPDVQGACQDKRPIEWFENFLDEDVISLLVSESNKYAVKKNLPGDITTEDMKCFIGILLVSGYSWLPRRRMYWENSPDTKNELISSAMTRDRFDFIFRHLHVNDNLDLQDKYTKVRPLVTLLNKKFLEFSPLEEHYSVDEAMIPYYDRHGCKQHIKGKPIRYGFKAWVGATRLGYVLWMEPYQGATTMCNPIYKELGLGASVVLTFCDVLISRGFDLPYHVVFDNFFTGTPLLEEITKKGLRCTGTVRENRTSSCPLITSKLLKKKERGAVDYRTTHDNTFIIAKWHDNNIFSIASNAVGINPKQSAKRFSQSEKRNIVIEEPHMVSIYNKYMGGVDRSDENISHYRIGIRGKKWYMPLLTHMIDLAEHNAWQLYKINHGKLDHLGFRRRVAIALIESNRKNAKRGPSRPSHHEHADSRKDQMNHLVIPQSKQTHCRQCHKKCLTRCKKCDVGVCVKCFETYHS

SEQ ID NO: 16806 - DNA, 2406 bp, Chilo suppressalis
cccagattagcctactgtcctatatttaggacagtagaaataaaaaaaaatatcagaataccctctttatctaagattatttagtcttatgatttgcagtaagaaacgtgtcagctttattagaaaaaataaaaagacagttattttaacagtttttaccttataagtgtgtaataaaagtgcgttgcagacatggcaaatgacaggtatgtataaaaagttatattttactcgtgagttgtttttttctgtgttaatatctagttgataaccttaacttttgtactaaataaatattctagcaaaataatataaataaattacgtataacttgttacaaatactagcgtactatatataggacagtaggataatatacatgattttagtacaataatacaactttttctttacagaccgttagctgcgcatgaaattttagatgctttagaaaatgtttctgataatgaagaagattatagagaacgactgatatgtattctacctcctcctgttgatcctgcctgtctcactgacgaagattcgggtgaataagataatgtaactttgaataatttgccacgaaacattctgcttcaaccggctgaagtaatgattcaagggcagattatggtgagtgatacagaagaagaaccttctgattctacaggtcgaactaaacgtaggcgtacctacgcatggagaaaacgggacttggcaaaaaatcccgtgaattggccagatgttcaaggcgcttgccaagataagcgcccaattgagtggtttgaaaacttcttagatgaagatgttatttcgttgttggtgtcagagagcaataaatatgctgtcaaaaagaatttgcctggagacataaccactgaagatatgaaatgtttcatcggcatattgttggttagtggttattcatggctcccccgtagaagaatgtattgggaaaactcccctgatacaaagaatgaattgatcagctcggctatgactagggatagatttgactttatttttcgccaccttcatgtcaatgataatctggatttgcaagacaaatacacaaaagtacgccccctagttacacttctaaataaaaagttcttagagttttctcctcttgaagagcattacagtgtagatgaggccatgatcccctactatgatagacatggctgcaaacagcacataaaaggtaaacctattaggtacgggttcaaagcttgggttggtgctacacggttagggtatgttttatggatggaaccataccaaggtgctacaactatgtgcaatccaatatataaagaattggggctgggtgcaagcgttgttctcactttttgcgatgtgctgatttcacgtggcttcgaccttccttaccacgtagtttttgataatttttttactgggacgcccttgctggaagagataacaaagaaaggccttcgttgcactgggacagttcgagaaaacaggacatctagttgtcctctgattacatcgaagttactgaaaaaaaaggaacgtggtgctgtcgattacagaacgacacatgacaacacgttcattattgctaaatggcatgacaataatatattcagtattgcttctaatgctgtaggaataaatcctaaacaatctgccaaacgcttctcacaaagtgaaaagagaaacattgtcatagaagaaccacatatggtgtccatctataacaaatatatgggaggagtggatcggtctgatgaaaatatttcacattaccgaattggtatacgaggtaagaaatggtacatgccgttgctcacacacatgattgatcttgccgaacataatgcatggcagttatataaaataaatcatggaaaactggatcatcttggctttcgcagaagggtagcaattgctttgattgaatcaaacagaaaaaatgccaaaagagggcctagccgaccctcccatcatgaacatgctgatagtcgtaaagaccaaatgaatcatctggttattcctcaatcgaagcaaacacactgtcgtcaatgtcacaaaaaatgtttgacacgttgcaagaaatgtgatgttggagtgtgtgtcaagtgttttgaaacatatcattcataaatagtgttaatctagtaaattacatataacaatgggtaatataatcaatagttatctaataaactacactttttgattacattctgttttgtcataaatggtcttttatttcctcttattatcctactgtcctacatataggacggctgtttccctgaaagccttacacttaatttttttttcataattttttttatgttgcataagatctaataaactaaataatgtaacttttttgaaaattttcagaaaattttagtttcaggcttatctggg

SEQ ID NO: 16807 - protein, 622 aa, Drosophila melanogaster
MSSSGRKRKQQLKPRQDDHRSPVKRRSVDIKSEPLDGYPALADYDLSTADIKPDLTELQLQLVAEQQAASNTIRLELEQQESDSDEDGYSELDYQAEDVFCQDDMDDYDPDWSSQQTGSRLLFKFPIQQSGLKFGQRFQGPQHYFNQVLGNRSKFFSSLAQSCNLKGGELKSNPTTAEEMEIFMALSLLMCDLKLEHLSDYWSTNMFYGLVGFSGKIPLERYQQLLHCLNFDAPQLQAGRAKVKNSLLLDFINERMEEIYICGQQLVLNEPITLWKGALRYQDELPNKFRTNALLLHMLTEQSGLVVKILPEIVRKEDAPAWVRNSRQLVEHRNKIVLKLMEGYHGGRTVYTSKFYGSYGLAQELAKKSTYCTGLLDRNRYGNSKALVHQRLDSNSISTSYATSLMMAKWRRRAKSLYCFSSDCLAIYSKEMAMQKTNAKPKLIQELEFQLRPGNDGRHHLIHYQAACKELKANIKLTIFLLNILVYNAYLLYFANGQNARVGHLKSYSEFRVIIIKSLLREEVTNEPVTSIQKPETYERSKNKPVPEPRLKTILHEPMLIQQNGKPAKKNCRYCHKGGMLQFSRYMCNTCPDKPGLCQEPCFLLWHEQLKKVIRQTIGRSE

SEQ ID NO: 16808 - protein, 581 aa, Heliotis virescens
MSKMASKRLSNTQIVDVLEDDEECIIDSPDEDEVDAEVIQSDHNSESQESANEIDSEWSDTDNEPLSRLASEDSDNFYFSKNKCTKWAKEPPRTSVRVRRHNIMRETPGPKGRAKEIQTISEAFFCMFSMDTVNLVLQQTNDYIKSIQEKFQRERDCKVLEYEELLAYLGLLYMSGVLRSSHLNFKDLWATDGTGIEFFQNTMSFNRFLFISRCVRFDDKNTKSERLKTDKLAAVREFTDLMNNNFINNYCASENVTLDEQLPAFRGRFSGVVYMPNKPTKYGIKHYALVDSATFYLLKFEIYAGVQPEGPYRMPNDTVSLVKRMTEPIWGTGRNVTMDNWFTSVPLANILLKDHQLTMVGTIRKNKPEIPTCFQPKRTRTEHSSLFGFQEDVTLCSYVPKKSKAVLLISSMHNDNNIVESEKKKPEIILYYNSTKGGVDTNDQMCANYNVGRRTKRWPMVIFYHLLNVAGINAYVIFKNKIDHGISRREFLKHLAVDLVKVHQQTRSNIPQLPRAVQKRLKRNAEVQDPGSTSRGGPSTSYKRCHICPRSKDKKIRFMCAKCHHHICHDHSTMICDKCID

SEQ ID NO: 16809 - protein, 594 aa, Macdunnoughia crassisigna
MGSSINDEHILSALLQSDDELVGEDSDSEISDHVSEDDVQSDTEEAFIDEVHEVQPTSSGSEILDEQNVIEQPGSSLASNRTLTLPQRTIRGKNKHCWSTSKSTRRSRVSALNIVRSQRGPTRMCRNIYDPLLCFKLFFTDEIISEIVKWTNAEISLKRRESMTGATFRDTNEDEIYAFFGILVMTAVRKDNHMSTDDLFDRSLSMVYVSVMSRDRFDFLIRCLRMDDKSIRPTLRENDVFTPVRKIWDLFIHQCIQNYTPGAHLTIDEQLLGFRGRCPFRMYIPNKPSKYGIKILMMCDSGTKYMINGMPYLGRGTQTNGVPLGEYYVKELSKPVHGSCRNITCDNWFTSIPLAKNLLQEPYKLTIVGTVRSNKREIPEVLKNSRSRPVGTSMFCFDGPLTLVSYKPKPAKMVYLLSSCDEDASINESTGKPQMVMYYNQTKGGVDTLDQMCSVMTCSRKTNRWPMALLYGMINIACINSFIIYSHNVSSKGEKVQSRKNFMRNLYMSLTSSFMRKRLEAPTLKRYLRDNISNILPNEVPGTSDDSTEEPVTKKRTYCTYCPSKIRRKANASCKKCKKVICREHNIDMCQSCF

SEQ ID NO: 16810 - DNA, 2472 bp, Macdunnoughia crassisigna
ccctagaaagatagtctgcgtaaaattgacgcatgcattcttgaaatattgctctctctttctaaatagcgcgaatccgtcgctgtgcgtttaggacatctcagtcgccgcttggagctcccgtgaggcgtgctcgtcaatgcggtaagtgtcactgattttgaactataacgaccgcgtgagtcaaaatgacgcatgattatcttttacgtgacttttaagatttaactcatacgataattatattgttatttcatgttctacttacgtgataacttattatatatatattttcttgttatagatatcgtgactaatatataataaaatgggtagttctataaacgatgagcatatcctctctgctcttctgcaaagcgatgacgagcttgttggtgaggattctgacagtgaaatatcagatcacgtaagtgaagatgacgtccagagcgatacagaagaagcgtttatagatgaggtacatgaagtgcagccaacgtcaagcggtagtgaaatattagacgaacaaaatgttattgaacaaccaggttcttcattggcttctaacagaaccttgaccttgccacagaggactattagaggtaagaataaacattgttggtcaacttcaaagtccacgaggcgtagccgagtctctgcactgaacattgtcagatctcaaagaggtccgacgcgtatgtgccgcaatatatatgacccacttttatgcttcaaactattttttactgatgagataatttcggaaattgtaaaatggacaaatgctgagatatcattgaaacgtcgggaatctatgacgggtgctacatttcgtgacacgaatgaagatgaaatctatgctttctttggtattctggtaatgacagcagtgagaaaagataaccacatgtccacagatgacctctttgatcgatctttgtcaatggtgtacgtctctgtaatgagtcgtgatcgttttgattttttgatacgatgtcttagaatggatgacaaaagtatacggcccacacttcgagaaaacgatgtatttactcctgttagaaaaatatgggatctctttatccatcagtgcatacaaaattacactccaggggctcatttgaccatagatgaacagttacttggttttagaggacggtgtccgtttaggatgtatatcccaaacaagccaagtaagtatggaataaaaatcctcatgatgtgtgacagtggtacaaagtatatgataaatggaatgccttatttgggaagaggaacacagaccaacggagtaccactcggtgaatactacgtgaaggagttatcaaagcctgtgcacggtagttgtcgtaatattacgtgtgacaattggttcacctcaatccctttggcaaaaaacttactacaagaaccgtataagttaaccattgtgggaaccgtgcgatcaaacaaacgcgagataccggaagtactgaaaaacagtcgctccaggccagtgggaacatcgatgttttgttttgacggaccccttactctcgtctcatataaaccgaagccagctaagatggtatacttattatcatcttgtgatgaggatgcttctatcaacgaaagtaccggtaaaccgcaaatggttatgtattataatcaaactaaaggcggagtggacacgctagaccaaatgtgttctgtgatgacctgcagtaggaagacgaataggtggcctatggcattattgtacggaatgataaacattgcctgcataaattcttttattatatacagccataatgtcagtagcaagggagaaaaggttcaaagtcgcaaaaattttatgagaaacctttacatgagcctgacgtcatcgtttatgcgtaagcgtttagaagctcctactttgaagagatatttgcgcgataatatctctaatattttgccaaatgaagtgcctggtacatcagatgacagtactgaagagccagtaacgaaaaaacgtacttactgtacttactgcccctctaaaataaggcgaaaggcaaatgcatcgtgcaaaaaatgcaaaaaagttatttgtcgagagcataatattgatatgtgccaaagttgtttctgactgactaataagtataatttgtttctattatgtataagttaagctaattacttattttataatacaacatgactgtttttaaagtacaaaataagtttatttttgtaaaagagagaatgtttaaaagttttgttactttatagaagaaattttgagtttttgtttttttttaataaataaataaacataaataaatggtttgttgaatttattattagtatgtaagtgtaaatataataaaacttaatatctattcaaattaataaataaacctcgatatacagaccgataaaacacatgcgtcaattttacgcatgattatctttaacgtacgtcacaatatgattatctttctaggg

SEQ ID NO: 16811 - DNA, 2464 bp, Pectinophora gossypiella
ccctagataactaaacattcgtccgctcgacgacgcgctatgccgcgaaattgaagtttacctattattccgcgtcccccgcccccgccgctttttctagcttcctgatttgcaaaatagtgcatcgcgtgacacgctcgaggtcacacgacaattaggtcgaaagttacaggaatttcgtcgtccgctcgacgaaagtttagtaattacgtaagtttggcaaaggtaagtgaatgaagtatttttttataattattttttaattctttatagtgataacgtaaggtttatttaaatttattacttttatagttatttagccaattgttataaattccttgttattgctgaaaaatttgcctgttttagtcaaaatttattaacttttcgatcgttttttagatggatttgagaaaacaagatgagaaaatacgtcaatggcttgagcaagatattgaggaggacagtaagggagagtcagacaattcaagttcggaaacggaagatattgtggagatggaagttcacaaaaatacgagcagcgaatctgaagtttccagcgagtccgattacgaacccgtttgcccaagtaagagacagagaacgcaaattattgaatcagaggaatctgataactccgaaagtattcgcccaagcagaagacagacaagtcgggttattgattcggacgaaactgatgaggatgtaatgagctccactcctcagaatatccctcgtaatccgaatgttattcagccaagttccagattcctttatggtaaaaataaacacaaatggtcgtcagcagccaaaccatcttctgtgcgaacttctagaagaaacatcatacattttataccaggaccaaaagaaagagcaagggaagtttctgaaccaattgatatattttccctgtttataagcgaagatatgttgcaacaagtcgtgacatttactaatgcagagatgcttattagaaaaaataagtataaaaccgagacgtttactgtatctcctaccaatttggaagaaataagagctttgcttggtttattgttcaatgcagcagctatgaaaagtaatcatttaccaactcgcatgcttttcaatactcatcgatcaggaacgattttcaaagcttgtatgagcgcagaacgattaaattttcttatcaaatgcctccgatttgatgacaagcttacaagaaatgtaagacagcgagatgataggtttgcacctatacgtgacttgtggcaagcattgatatctaactttcagaaatggtacactccagggtcctatattaccgtagacgaacagctggtcggatttcgaggaagatgttcatttaggatgtatattccaaacaagcctaataaatacggaataaaacttgttatggctgcagatgtaaacagcaaatatatagtgaatgccattccgtacttgggaaaaggaactgatcctcaaaatcaaccgttggctacgttttttataaaagaaataacgtctacattacatggcacgaatcgaaacataaccatggacaactggttcacgtctgttcccttagctaacgagctgttgatggcaccttataatttgacattagtgggaactctaagaagtaataaacgagaaattcctgaaaaactcaaaaattctaagtcacgcgcaattggtacttcgatgttttgttacgatggtgataagacattagtttcatacaaagccaaatctaataaagttgttttcatcttgtctacaattcatgatcaacctgacatcaatcaagaaacaggaaaaccagaaatgattcatttctacaacagtacaaagggtgcagtagataccgtggaccaaatgtgctccagcatttccaccaacagaaaaacccaaagatggcctttgtgcgtgttttataacatgttgaatctatcgattatcaatgcgtacgttgtatacgtttataataatgttagaaataataaaaaacctatgtctcggcgtgacttcgttataaaactaggagaccaacttatggagccctggctgcggcagcggttgcagacggtgactttgagacgtgatatcaaggtcatgatacaagatatcttaggggagtcttctgatctagaagcccctgttccttctgtgtctaatgtgcgtaaaatctactacctatgtccttccaaagcccgaagaatgacaaaacaccgatgcattaaatgcaaacaggctatttgcgggccccataatattgacatatgtagtcgctgtattgaatagtttcactaagtaattttgttcctatttagtagataagtaacacataattattgtgatattcaaaacttaagaggtttaataaataataataaaaaaaaaatggtttttatttcgtagtctgctcgacgaatgtttagttattacgtaaccgtgaatatagtttagtagtctaggg

SEQ ID NO: 16812 - protein, 449 aa, Tribolium castaneum
MDIFRLVDLAAAYDGTATGFEIDVWRPTMNTTNVYPVHAIKMAENDNYVGLSKEEVSALKELITTAESEEDSDIETELENVNDCWSTDPLLHTPIFSKVMPRDRYLLLLRLLHFCDNTKQKKGERTFKIDLVMSFLSNRFKVLFTPFENLCIDESLVLWKERLSFKQYIKSKRHRFGVKMFVLCNVETDYILGFIVYTGSQTKIKPSDLGISGSVVLTLLEDYLDKGHNLYIDNWHSSPELALHLYQHKTNVCGTVRTNRRHMPKLPDPKVKGDIESQHTAEMMTGKVDRTSKEEVKKPTCIVDYNANMGSVDKVDMLLSSVECLRKTIKWYKKIFFHLVDLCMINAHAMYKLEVIRQIVKKYAKIQKTSKKGRPSSGDNPLRLIGRHFPQKIPPVPGGKKTCQRICFVCKHTQRGVSRRRDTSYQCAECDKALCLIPCFEVYHTKQIF

SEQ ID NO: 16813 - protein, 487 aa, Daphnia pulicaria
MQKKADAKKVAQHKAANRNWKECKVWGDVGRQSRADDDSPRPQFQERAIQFAPLEEPGPVLSQFNRFSNPLGVFKSMLGGEDTLYLLREATNDYIAEFWSSRKTPPSRKVGGKPEGRLIGPRLPAGGFVTDHELVAFFGIQFLIGYHRLPELSMFWEQQPDAGLGLGIIQQAMTRERFKFISKHIACASPWDDVDPNSDDPDQEPERPDPIRKIRPLVKRLNERYHACRKPPRGQSIDESMVKFKGRSVLRQTMKNKPIKSGFKIWSRCCHRGYTYKFEIYQGARFGEKQGRSRNNEAVERVVVDLCQPLTDQGFVVAFDRFFTSIALLDKLRENGVNAVGTILPSRVNQPIMTKNESNLRPDEFAAKFGGEPGTCRKGIFVWRDTKAFRVASNYHGSNLVKVRRKQRDGSFKTKSCPKAIDDYVNNMGGVDTANQLRSYYERDRKAKKWWHRLLYSLLETCLVNSWICFNDMVRSQMAEIKTSNTQ

SEQ ID NO: 16814 - protein, 585 aa, Homo Sapiens
MSNPRKRSIPMRDSNTGLEQLLAEDSFDESDFSEIDDSDNFSDSALEADKIRPLSHLESDGKSSTSSDSGRSMKWSARAMIPRQRYDFTGTPGRKVDVSDITDPLQYFELFFTEELVSKITRETNAQAALLASKPPGPKGFSRMDKWKDTDNDELKVFFAVMLLQGIVQKPELEMFWSTRPLLDTPYLRQIMTGERFLLLFRCLHFVNNSSISAGQSKAQISLQKIKPVFDFLVNKFSTVYTPNRNIAVDESLMLFKGPLAMKQYLPTKRVRFGLKLYVLCESQSGYVWNALVHTGPGMNLKDSADGLKSSRIVLTLVNDLLGQGYCVFLDNFNISPMLFRELHQNRTDAVGTARLNRKQIPNDLKKRIAKGTTVARFCGELMALKWCDGKEVTMLSTFHNDTVIEVNNRNGKKTKRPRVIVDYNENMGAVDSADQMLTSYPSERKRHKVWYKKFFHHLLHITVLNSYILFKKDNPEHTMSHINFRLALIERMLEKHHKPGQQHLRGRPCSDDVTPLRLSGRHFPKSIPATSGKQNPTGRCKICCSQYDKDGKKIRKETRYFCAECDVPLCVVPCFEIYHTKKNY

SEQ ID NO: 16815 - protein, 409 aa, Mus musculus
MPPSASAVDFFQLFVPDNVLKNMVVQTNMYARKFQERFGSDGAWVEVTLAEMKAFLGYVISTSVSHCESVLSIWSGGFYSNRSLALVMSQARFEKILKYFHVVAFRSSQTTHGLYKVQPFLDSLQSGFDAAFRPSQTQVLHEPLIDEDPVFIATCTERELRKRKKRKFSLWVRQCSSTGFIIQIYVHLKEGGGPDGLDALKNKPQLHSMVARSLCRNAAGKNYIIFTGPSITSLNLFEEFEKQGIYCCGLLSSRKSDCTGLPPSMLTNPATPLARGQHQIRTKGNMSLICWYNKGHFRFLTNAYSPVQKGVIIKRRSGEIPCPLAVEAFAAHLSYICRYDDKYSKYFISHKPNKTWQQVFWFAISIAVNNAYILYKMSDAYHVKKYSRAQFGERLVRELLGLEDSSPAH

SEQ ID NO: 16816 - protein, 704 aa, Macaca fascicularis
MRPEAEGDSEGEESEYFPTEEEEEEEEDDEVEGVEADLSGDGTDYELKPLPKGRKRQKKVPVQEIDDDFFPSSGEEAEASPIGEGGGGGRKVGRYRDDGDEDYYKQRLSPKMPRTLSLHEITDLLETDDSIEASAIVIQPPENATAPVSDEESGDEEGGTINNLPGSLLHTAAYLIQDGSDAESDSDDPSYAPKDDSPDEVPSTSSVQQPPPSRRRKMTKIVCKWKKADLTVQPVAGRVTAPPNDFFTEMRTPTEILELFLDDEVIELIVKYSNLYADSKGVHLGLTSSEFKCFLGIIFLSGYVSVPRRRMFWEQRTDVHNVLVSAAMRRDRFETIFSNLHVADNADLDPVDKFSKLRPLISKLNERCMKFVPNETYFSFDEFMVHYFGRHGCKQFIRGKPIRFGYKFWCGATCLGYICWFQPYQGKNPNTKHEEYGVGASLVLQFSEALTEAHPGRYHFVSNNFFTSIALLDKLSSMGHQATGTVRKDHIDKVPLESDVALKKKERGTFDYRIDGKGNIVCRWNDNSVVTVASSGAGIHPLCLVSRYSQKLKKKIQVQQPNMIKVYNQFMGGVDRADENIDKYRASIRGKKWYSSPLLFCFELVLQNAWQLHKTYDEKPVDFLEFRRRVVCHYLETHGHPPEPGQKGRPQKRNIDSRYDGINHVIVKQGKQTRCAECHKNTAFRCEKCDVALHVKCSVEYHTE

SEQ ID NO: 16817 - DNA, 2511 bp, Macaca fascicularis
ttggcagatcaagcaaaactgtcttttgaaaggaaggagcaagctacttgtaataaaagaccagctagaaaagctccagcctcagtcacgcctccggccccaacacaaagtaaaaacaaaccaaacaagaaagccaaagttctgtccaaaaaagaggagcgtttgaaaaagcacatcaagaaactccagaagagggctttgcagttccaggggaaagtgggattgccaaaggcaaggagaccctgggagtcagacatgaggccagaggcagagggagactctgagggtgaagagtctgagtatttccccacagaggaggaggaggaggaggaggaagatgacgaggtggagggggtggaggcagacctctctggagacggtactgactatgagctgaagcctctgcccaagggccggaaacggcagaagaaagtcccagtgcaggagattgacgacgactttttcccaagttctggggaagaagctgaagcttctcctataggagaaggaggaggaggaggtcggaaagtaggaagataccgagatgatggagatgaagattattataagcagcggttaagtcccaagatgcctcgaacactaagtttacatgaaataactgaccttttagagacagatgacagcatagaagcaagtgctatagtgatacaaccacctgaaaatgctacagcacctgtttcagatgaggaatcaggagatgaagaaggtggaacaataaataatctgccaggttctttgttgcacacagctgcgtatcttattcaagatggctctgatgctgagtctgactcagatgatccctcatatgcacctaaagatgactctcctgatgaagttccatctacgtcttctgtgcagcaacctccaccatcaaggaggaggaaaatgacaaaaattgtttgcaaatggaaaaaagccgacctaactgtacaacccgtagcaggtagagttacagcaccaccaaacgatttcttcaccgaaatgagaactcccacagaaattcttgaactttttcttgatgacgaggtcattgaactcattgtcaagtactccaacttatatgctgacagtaaaggtgtacatcttggcttgactagctctgaattcaaatgttttctgggaattatttttctgagtggttatgtttcagttcctagaaggcgtatgttttgggaacaaagaacggatgtgcataatgtactggttagtgctgccatgagacgtgaccgatttgaaactatattttctaatttgcatgttgctgacaatgcagatttggatccagtggacaaattttccaaattgcgacctctcataagcaaactcaatgagagatgcatgaaatttgttccaaatgaaacatatttcagctttgatgaattcatggttcattattttggtcgtcatgggtgcaaacagtttattcggggaaagcccattcggtttggctataagttttggtgtggtgccacctgtctgggctacatttgctggtttcagccgtatcagggtaaaaacccaaatactaaacatgaggaatatggtgtcggtgcgtcacttgtccttcagtttagtgaggcacttacagaggcacaccctggacgataccattttgtatccaataactttttcaccagtattgcacttcttgataagctcagttcaatgggacatcaggcaacaggtacagtgagaaaggatcacattgacaaagttccattggaatcagatgtagctttaaagaaaaaagaaagaggcacatttgattatcgaattgatggcaaaggcaatattgtctgcagatggaatgataacagtgttgtcactgttgcctcatctggtgctggtatccatcccctgtgtcttgtcagtcgttattcccagaaattgaaaaagaagatccaagttcagcagccaaacatgatcaaagtgtataaccaattcatgggaggcgtagacagagctgatgaaaacattgataagtatcgggcctcaatccgtggaaagaaatggtattcaagccctcttttgttctgtttcgaattggtcttacaaaatgcttggcaattgcataaaacatatgatgagaaaccagtggattttctggagtttcgtcgacgtgtggtatgccattatctggagacccatggtcatcctccagaacctggccaaaaaggaagacctcagaagcgtaacattgactcccgttatgatggcataaatcatgtgatagtcaaacagggaaagcaaacgcggtgcgctgaatgtcataagaacaccgcttttcgatgtgaaaaatgtgatgttgccttacatgtgaagtgttccgttgaatatcacactgaatagcaggtgtcaccacctcctgagacaagaaacataattttatacattatgtacagtggttttgcctagtgttccaattttggaacgtcacataacaatggaacataataaattttttttatcttcaaaaaaaaaaaaaaaaaa

SEQ ID NO: 16818 - protein, 591 aa, Rattus norvegicus
  misc_feature (382)..(382): Xaa can be any naturally occurring amino acid
MSHTDLHGRWFVLCDESVDAVSYACPMRFLLVSESQCPFEGDDPARGGAHSKVRSPKLLKVLSALEEGESGSNREEIFIAPPNNASEDLTDEDSGEEDSDQNSAQLPGWVLRASVLFIVNETNRYARQKNITLDLTVQELKRDRFELIFSYLHFVDNSEPDESDSFAKGTLFTKDRGLDVGASMVVRFVDALQECGCLPCHIFLDKVFTSVKPMSILREKGVKATGTVCEYRTECCPLKDAKELRKMRKGSFDYRVDESQEIIVCRWSNSHVVNICSNAVGIEPARGVGRMDQNIAKYKVKIRGMKRYLSFIGYIIDAALNNAWQLHRVCCQDGHVDLHSFRSYVARVYLESNVDTSSPGRRSRWVETENRFNMIGHWIVHXDKRTQCALCHSQTNTCCEKCQKGVHTFSSYSDITRNTFRWPVRRDRDVGKETFTQAWGGGAGKTQSQLLSKVDDIKQSLDIIHTQRAPESLKIRDPVTRGRDCIEQRGLRMQVLVSHRQHSRVPSRRELEEAVALGLALSLTLMCAQQNEDPSNKIKQQKKTERKHRHVVATSIHILEPGQKAVSSVPETGPMIVSDLPCVATNVQTPR

SEQ ID NO: 16819 - protein, 581 aa, Ciona intestinalis
MAVKGVSADETIWSFLEAESEKDKGDAAYACSSDESDILMDEFNATSSKNVDAPNHCCLSSDDETTVHTSSKLQKLLNDRSKSKRTVQQTHLEELSAEDSMEDWVRIVTDYYPEDHNLRETVMESGMDGVTPLDYLAMFLSAEFWDLLVTETNRHAAQTLRKKKLKKGSNLRTWKDTTVAEMKAYFAILLSMGLCNTVDMQDYWSASWITVTSSISKIMSRVRFTLIRAMLHFCNDEESSSKNSQKHNRLFKVRQLIDVLVPKFSALYKPDKELAIHEMTVACNYKSEQRVRKKPIQWTDKVYALTEARTGYLLEWAIHAGSSRETEKGASIVRKLCTRYIGKHDIYINTANSYTNRNLAKEFVSQTNGSGGIPGELKTINEKNNPVCAKSAVRSSEIKAKSATQKGNKRSYNDMKKANSKKRYNYLSGVIPIFRQLNLFRHKTVKWSLRIFENLAQICVVNSYILYTSKTSDSSDKMDLKKYIEACVSGLLVDYNPHITEKWRPPQPGTVLSRILPPQYVHKIIKIDKKPQCVVCSDSRRKLGRRQTSFMCEKCNVALCVVPCFHRYHTLKNYRVCHLDM

SEQ ID NO: 16820 - protein, 589 aa, Artificial Sequence
  Synthetic Sequence
MAKRFYSAEEAAAHCMASSSEEFSGSDSEYVPPASESDSSTEESWCSSSTVSALEEPMEVDEDVDDLEDQEAGDRADAAAGGEPAWGPPCNFPPEIPPFTTVPGVKVDTSNFEPINFFQLFMTEAILQDMVLYTNVYAEQYLTQNPLTRYARAHAWHPTDIAEMKRFVGLTLAMGLIKANSLESYWDTTTVLSIPVFGATMSRNRYQLLLRFLHFNNNATAVPPDQPGHDRLHKLRPLIDSLSERFANVYTPCQNICIDESLLLFKGRLQFRQYIPSKRARYGIKFYKLCESSSGYTSYFLIYEGKDSKLDPPGCPPDLTVSGKIVWELISPLLGQGFHLYVDNFYSSIPLFTALYCLNTPACGTINRNRKGLPRALLDKKLNRGETYALRKNELLAIKFFDKKNVFMLTSIHDESVIREQRVGRPPKNKPLCSKEYSKYMGGVDRTDQLQHYYNATRKTRHWYKKVGIYLIQMALRNSYIVYKAAVPGPKLSYYKYQLQILPALLFGGVEEQTVPEMPPSDNVARLIGKHFIDTLPPTPGKQRPQKGCKVCRKRGIRRDTRYYCPKCPRNPGLCRKPCFEIYHTQLHY

SEQ ID NO: 16821-17899 - skipped (1079 entries)

SEQ ID NO: 17900 - protein, 636 aa, Tribolium castaneum
MMLNWLKSGKLESQSQEQSSCYLENSNCLPPTLDSTDIIGEENKAGTTSRKKRKYDEDYLNFGFTWTGDKDEPNGLCVICEQVVNNSSLNPAKLKRHLDTKHPTLKGKSEYFKRKCNELNQKKHTFERYVRDDNKNLLKASYLVSLRIAKQGEAYTIAEKLIKPCTKDLTTCVFGEKFASKVDLVPLSDTTISRRIEDMSYFCEAVLVNRLENAKCGFTLQMDESTDVAGLAILLVFVRYIHESSFEEDMLFCKALPTQTTGEEIFNLLNAYFEKHSIPWNLCYHICTDGAKAMVGVIKGVIARIKKLVPDIKASHCCLHRHALAVKRIPNALHEVLNDAVKMINFIKSRPLNARVFALLCDDLGSLHKNLLLHTEVRWLSRGKVLTRFWELRDEIRIFFNEREFAGKLNDTSWLQNLAYIADIFSYLNEVNLSLQGPNSTIFKVNSRINSIKSKLKLWEECITKNNTECFANLNDFLETSNTALDPNLKSNILEHLNGLKNTFLEYFPPTCNNISWVENPFNECGNVDTLPIKEREQLIDIRTDTTLKSSFVPDGIGPFWIKLMDEFPEISKRAVKELMPFVTTYLCEKSFSVYVATKTKYRNRLDAEDDMRLQLTTIHPDIDNLCNNKQAQKSH

SEQ ID NO: 17901 - DNA, 1911 bp, Tribolium castaneum
atgatgttgaattggctgaaaagtggaaagcttgaaagtcaatcacaggaacagagttcctgctaccttgagaactctaactgcctgccaccaacgctcgattctacagatattatcggtgaagagaacaaagctggtaccacctctcgcaagaagcggaaatatgacgaggactatctgaacttcggttttacatggactggcgacaaggatgagcccaacggactttgtgtgatttgcgagcaggtagtcaacaattcctcacttaacccggccaaactgaaacgccatttggacacaaagcatccgacgcttaaaggcaagagcgaatacttcaaaagaaaatgtaacgagctcaatcaaaagaagcatacttttgagcgatacgtaagggacgataacaagaacctcctgaaagcttcttatctcgtcagtttgagaatagctaaacagggcgaggcatataccatagcggagaagttgatcaagccttgcaccaaggatctgacaacttgcgtatttggagaaaaattcgcgagcaaagttgatctcgtccccctgtccgacacgactatttcaaggcgaatcgaagacatgagttacttctgtgaagccgtgctggtgaacaggttgaaaaatgctaaatgtgggtttacgctgcagatggacgagtcaacagatgttgccggtcttgcaatcctgcttgtgtttgttaggtacatacatgaaagctcttttgaggaggatatgttgttctgcaaagcacttcccactcagacgacaggggaggagattttcaatcttctcaatgcctatttcgaaaagcactccatcccatggaatctgtgttaccacatttgcacagacggtgccaaggcaatggtaggagttattaaaggagtcatagcgagaataaaaaaactcgtccctgatataaaagctagccactgttgcctgcatcgccacgctttggctgtaaagcgaataccgaatgcattgcacgaggtgctcaatgacgctgttaaaatgatcaacttcatcaagtctcggccgttgaatgcgcgcgtcttcgctttgctgtgtgacgatttggggagcctgcataaaaatcttcttcttcataccgaagtgaggtggctgtctagaggaaaggtgctgacccgattttgggaactgagagatgaaattagaattttcttcaacgaaagggaatttgccgggaaattgaacgacaccagttggttgcaaaatttggcatatatagctgacatattcagttatctgaatgaagttaatctttccctgcaagggccgaatagcacaatcttcaaggtaaatagccgcattaacagtattaaatcaaagttgaagttgtgggaagagtgtataacgaaaaataacactgagtgttttgcgaacctcaacgattttttggaaacttcaaacactgcgttggatccaaacctgaagtctaatattttggaacatctcaacggtcttaagaacacctttctggagtattttccacctacgtgtaataatatctcctgggtggagaatcctttcaatgaatgcggtaacgtcgatacactcccaataaaagagagggaacaattgattgacatacggactgatacgacattgaaatcttcattcgtgcctgatggtataggaccattctggatcaaactgatggacgaatttccagaaattagcaaacgagctgtcaaagagctcatgccatttgtaaccacttacctctgtgagaaatcattttccgtctatgtagccacaaaaacaaaatatcgaaatagacttgatgctgaagacgatatgcgactccaacttactactatccatccagacattgacaacctttgtaacaacaagcaggctcagaaatcccactga

SEQ ID NO: 17902 - DNA, 458 bp, Artificial Sequence
  Synthetic polynucleotide
cagtgttcttcaacctttgccatccggcggaaccctttgtcgagatatttttttttatggaacccttcatttagtaatacacccagatgagattttagggacagctgcgttgacttgttacgaacaaggtgagcccgtgctttggtctagccaagggcatggtaaagactatattcgcggcgttgtgacaatttaccgaacaactccgcggccgggaagccgatctcggcttgaacgaattgttaggtggcggtacttgggtcgatatcaaagtgcatcacttcttcccgtatgcccaactttgtatagagagccactgcgggatcgtcaccgtaatctgcttgcacgtagatcacataagcaccaagcgcgttggcctcatgcttgaggagattgatgagcgcggtggcaatgccctgcctccggtgctcgccggagactgcgagatcatagatata

SEQ ID NO: 17903 - DNA, 361 bp, Artificial Sequence
  Synthetic Polynucleotide
gatatcaagcttatcgataccgtcgacctcgagatttctgaacgattctaggttaggatcaaacaaaatacaatttattttaaaactgtaagttaacttacctttgcttgtctaaaccaaaaacaacaacaaaactacgaccacaagtacagttacatatttttgaaaattaaggttaagtgcagtgtaagtcaactatgcgaatggataacatgtttcaacatgaaactccgattgacgcatgtgcattctgaagagcggcgcggccgacgtctctcgaattgaagcaatgactcgcggaaccccgaaagcctttgggtggaaccctagggttccgcggaacacaggttgaagaacactg

SEQ ID NO: 17904 - DNA, 325 bp, Artificial Sequence
  Synthetic Polynucleotide
cctgcaggagtgttcttcaacctttgccatccggcggaaccctttgtcgagatatttttttttatggaacccttcatttagtaatacacccagatgagattttagggacagctgcgttgacttgttacgaacaaggtgagcccgtgctttggtaataaaaactctaaataagatttaaatttgcatttatttaaacaaactttaaacaaaaagataaatattccaaataaaataatatataaaataaaaaataaaaattaatgacttttttgcgcttgcttattattgcacaaattatcaatatcgggatggatcgttgtttttt

SEQ ID NO: 17905 - DNA, 346 bp, Artificial Sequence
  Synthetic Polynucleotide
gagccaattcagcatcatatttctgaacgattctaggttaggatcaaacaaaatacaatttattttaaaactgtaagttaacttacctttgcttgtctaaacctaaaacaacaacaaaactacgaccacaagtacagttacatatttttgaaaattaaggttaagtgcagtgtaagtcaactatgcgaatggataacatgtttcaacatgaaactccgattgacgcatgtgcattctgaagagcggcgcggccgacgtctctcgaattgaagcaatgactcgcggaaccccgaaagcctttgggtggaaccctagggttccgcggaacacaggttgaagaacactg

SEQ ID NO: 17906-17909 - skipped (4 entries)

SEQ ID NO: 17910 - protein, 332 aa, Artificial Sequence
  Synthetic Polypeptide
MLRLLLALNLFPSIQVTGNKILVKQSPMLVAYDNAVNLSCKYSYNLFSREFRASLHKGLDSAVEVCVVYGNYSQQLQVYSKTGFNCDGKLGNESVTFYLQNLYVNQTDIYFCKIEVMYPPPYLDNEKSNGTIIHVKGKHLCPSPLFPGPSKPFWVLVVVGGVLACYSLLVTVAFIIFWVRSKRSRLLHSDYMNMTPRRPGPTRKHYQPYAPPRDFAAYRSRVKFSRSADAPAYKQGQNQLYNELNLGRREEYDVLDKRRGRDPEMGGKPRRKNPQEGLYNELQKDKMAEAYSEIGMKGERRRGKGHDGLYQGLSTATKDTYDALHMQALPPR

SEQ ID NO: 17911 - DNA, 996 bp, Artificial Sequence
  Synthetic Polynucleotide
atgctgagactgctgctggccctgaatctgttccccagcatccaagtgaccggcaacaagatcctggtcaagcagagccctatgctggtggcctacgacaacgccgtgaacctgagctgcaagtacagctacaacctgttcagcagagagttccgggccagcctgcacaaaggactggattctgctgtggaagtgtgcgtggtgtacggcaactacagccagcagctgcaggtctacagcaagaccggcttcaactgcgacggcaagctgggcaatgagagcgtgaccttctacctgcaaaacctgtacgtgaaccagaccgacatctatttctgcaagatcgaagtgatgtacccgcctccttacctggacaacgagaagtccaacggcaccatcatccacgtgaagggcaagcacctgtgtccttctccactgttccccggacctagcaagcctttctgggtgctcgttgttgttggcggcgtgctggcctgttatagcctgctggttacagtggccttcatcatcttttgggtccgaagcaagcggagccggctgctgcacagcgactacatgaacatgacccctagacggcccggaccaaccagaaagcactaccagccttacgctcctcctagagacttcgccgcctaccggtccagagtgaagttctccagatccgccgatgctcccgcctataagcagggccagaaccagctgtacaacgagctgaacctggggagaagagaagagtacgatgtgctggacaagcggagaggcagagatcctgagatgggcggcaagcccagacggaagaatcctcaagagggcctgtacaatgaactgcagaaagacaagatggccgaggcctacagcgagatcggaatgaagggcgagcgcagaagaggcaagggacacgatggactgtaccagggcctgagcaccgccaccaaggatacctatgatgccctgcacatgcaggccctgcctccaaga

SEQ ID NO: 17912 - protein, 463 aa, Artificial Sequence
  Synthetic Polypeptide
MSFPCKFVASFLLIFNVSSKGAVSKEITNALETWGALGQDINLDIPSFQMSDDIDDIKWEKTSDKKKIAQFRKEKETFKEKDTYKLFKNGTLKIKHLKTDDQDIYKVSIYDTKGKNVLEKIFDLKIQERVSKPKISWTCINTTLTCEVMNGTDPELNLYQDGKHLKLSQRVITHKWTTSLSAKFKCTAGNKVSKESSVEPVSCPEKGLDIYLIIGICGGGSLLMVFVALLVFYITKRKKQRSRRNDEELETRAHRVATEERGRKPHQIPASTPQNPATSQHPPPPPGHRSQAPSHRPPPPGHRVQHQPQKRPPAPSGTQVHQQKGPPLPRPRVQPKPPHGAAENSLSPSSNRVKFSRSADAPAYKQGQNQLYNELNLGRREEYDVLDKRRGRDPEMGGKPRRKNPQEGLYNELQKDKMAEAYSEIGMKGERRRGKGHDGLYQGLSTATKDTYDALHMQALPPR

SEQ ID NO: 17913 - DNA, 1389 bp, Artificial Sequence
  Synthetic Polynucleotide
atgagcttcccttgcaagttcgtggccagcttcctgctgatcttcaacgtgtcctctaagggcgccgtgtccaaagagatcacaaacgccctggaaacctggggagccctcggccaggatattaacctggacatccccagcttccagatgagcgacgacatcgatgacatcaagtgggagaaaaccagcgacaagaagaagatcgcccagttccggaaagagaaagagacattcaaagagaaggacacctacaagctgttcaagaacggcaccctgaagatcaagcacctgaaaaccgacgaccaggacatctataaggtgtccatctacgacaccaagggcaagaacgtgctggaaaagatcttcgacctcaagatccaagagcgggtgtccaagcctaagatcagctggacctgcatcaacaccacactgacctgcgaagtgatgaacggcacagaccccgagctgaacctgtaccaggatggcaaacacctgaagctgagccagcgcgtgatcacccacaagtggacaacaagcctgagcgccaagttcaagtgcaccgccggaaacaaagtgtctaaagagtccagcgtcgagcccgtgtcttgccctgaaaaaggactggacatctacctgatcatcggcatctgtggcggcggaagcctgctgatggtgtttgtggctctgctggtgttctacatcaccaagcggaagaagcagcggagcagacggaacgacgaggaactggaaacacgggcccatagagtggccaccgaggaaagaggcagaaagccccaccagattccagccagcacaccccagaatcctgccacctctcaacaccctccacctccacctggacacagatctcaggccccatctcacagacctccaccacctggtcatcgggtgcagcaccagcctcagaaaagacctcctgctcctagcggcacacaggtgcaccagcaaaaaggacctccactgcctcggcctagagtgcagcctaaacctcctcatggcgccgctgagaacagcctgtctccaagcagcaacagagtgaagttcagccgcagcgccgatgctcctgcctataagcagggacagaaccagctgtacaacgagctgaatctggggcgcagagaagagtacgatgtgctggacaagcggagaggcagagatcctgagatgggcggcaagcccagacggaagaatcctcaagagggcctgtataatgagctgcagaaagacaagatggccgaggcctacagcgagatcggaatgaagggcgagcgcagaagaggcaagggacacgatggactgtatcagggcctgagcaccgccaccaaggatacctatgatgccctgcacatgcaggccctgcctccaaga

SEQ ID NO: 17914-17999 - skipped (86 entries)

SEQ ID NO: 18000 - protein, 92 aa, Artificial Sequence
  Synthetic Sequence
MLPAPKNLVVSRVTEDSARLSWDIDEQRDWFESFLIQYQESEKVGEAIVLTVPGSERSYDLTGLKPGTEYTVSIYGVYHVYRSNPLSAIFTT

SEQ ID NO: 18001 - DNA, 276 bp, Artificial Sequence
  Synthetic Sequence
atgctgcctgcaccaaagaacctggtggtgtctcgggtgaccgaggactctgccagactgagctgggacatcgatgagcagagggattggttcgagagctttctgatccagtatcaggagtccgagaaagtgggcgaggccatcgtgctgacagtgcctggcagcgagcggtcctatgacctgaccggcctgaagccaggcacagagtacaccgtgtccatctacggcgtgtatcacgtgtacaggtccaatcctctgtctgccatcttcaccaca

SEQ ID NO: 18002 - protein, 92 aa, Artificial Sequence
  Synthetic Sequence
MLPAPKNLVVSRVTEDSARLSWAIDEQRDWFESFLIQYQESEKVGEAIVLTVPGSERSYDLTGLKPGTEYTVSIYGVYHVYRSNPLSAIFTT

SEQ ID NO: 18003 - DNA, 276 bp, Artificial Sequence
  Synthetic Sequence
atgctgcctgcaccaaagaacctggtggtgtctcgggtgaccgaggactctgccagactgagctgggccatcgacgagcagagggattggttcgagagctttctgatccagtatcaggagtccgagaaagtgggcgaggccatcgtgctgacagtgcctggcagcgagcggtcctatgatctgaccggcctgaagccaggcacagagtacaccgtgtccatctacggcgtgtatcacgtgtacaggtccaatcctctgtctgccatcttcaccaca

SEQ ID NO: 18004 - protein, 21 aa, Homo Sapiens
MALPVTALLLPLALLLHAARP

SEQ ID NO: 18005 - DNA, 63 bp, Homo Sapiens
atggcactgccagtcaccgccctgctgctgcctctggctctgctgctgcacgcagctagacca

SEQ ID NO: 18006 - protein, 24 aa, Homo Sapiens
IYIWAPLAGTCGVLLLSLVITLYC

SEQ ID NO: 18007 - DNA, 72 bp, Homo Sapiens
atctacatttgggcaccactggccgggacctgtggagtgctgctgctgagcctggtcatcacactgtactgc

SEQ ID NO: 18008 - protein, 112 aa, Homo Sapiens
RVKFSRSADAPAYKQGQNQLYNELNLGRREEYDVLDKRRGRDPEMGGKPRRKNPQEGLYNELQKDKMAEAYSEIGMKGERRRGKGHDGLYQGLSTATKDTYDALHMQALPPR

SEQ ID NO: 18009 - protein, 112 aa, Homo Sapiens; identical to SEQ ID NO: 18008

SEQ ID NO: 18010 - DNA, 336 bp, Homo Sapiens
cgcgtgaagtttagtcgatcagcagatgccccagcttacaaacagggacagaaccagctgtataacgagctgaatctgggccgccgagaggaatatgacgtgctggataagcggagaggacgcgaccccgaaatgggaggcaagcccaggcgcaaaaaccctcaggaaggcctgtataacgagctgcagaaggacaaaatggcagaagcctattctgagatcggcatgaagggggagcgacggagaggcaaagggcacgatgggctgtaccagggactgagcaccgccacaaaggacacctatgatgctctgcatatgcaggcactgcctccaagg

SEQ ID NO: 18011 - protein, 42 aa, Homo Sapiens
KRGRKKLLYIFKQPFMRPVQTTQEEDGCSCRFPEEEEGGCEL

SEQ ID NO: 18012 - protein, 42 aa, Homo Sapiens; identical to SEQ ID NO: 18011

SEQ ID NO: 18013 - DNA, 126 bp, Homo Sapiens
aagagaggcaggaagaaactgctgtatattttcaaacagcccttcatgcgccccgtgcagactacccaggaggaagacgggtgctcctgtcgattccctgaggaagaggaaggcgggtgtgagctg

SEQ ID NO: 18014 - protein, 45 aa, Homo Sapiens
TTTPAPRPPTPAPTIASQPLSLRPEACRPAAGGAVHTRGLDFACD

SEQ ID NO: 18015 - protein, 45 aa, Homo Sapiens; identical to SEQ ID NO: 18014

SEQ ID NO: 18016 - DNA, 135 bp, Homo Sapiens
actaccacaccagcacctagaccaccaactccagctccaaccatcgcgagtcagcccctgagtctgagacctgaggcctgcaggccagctgcaggaggagctgtgcacaccaggggcctggacttcgcctgcgac

SEQ ID NO: 18017 - DNA, 135 bp, Homo Sapiens
accacaacccctgcccccagacctcccacacccgcccctaccatcgcgagtcagcccctgagtctgagacctgaggcctgcaggccagctgcaggaggagctgtgcacaccaggggcctggacttcgcctgcgac

SEQ ID NO: 18018 - protein, 89 aa, Homo Sapiens
LPAPKNLVVSEVTEDSLRLSWTAPDAAFDSFLIQYQESEKVGEAINLTVPGSERSYDLTGLKPGTEYTVSIYGVKGGHRSNPLSAEFTT

SEQ ID NO: 18019 - protein, 90 aa, Homo Sapiens
MLPAPKNLVVSEVTEDSLRLSWTAPDAAFDSFLIQYQESEKVGEAINLTVPGSERSYDLTGLKPGTEYTVSIYGVKGGHRSNPLSAEFTT

SEQ ID NO: 18020 - protein, 4 aa, Homo Sapiens
TEDS

SEQ ID NO: 18021 - protein, 7 aa, Homo Sapiens
TAPDAAF

SEQ ID NO: 18022 - protein, 6 aa, Homo Sapiens
SEKVGE

SEQ ID NO: 18023 - protein, 4 aa, Homo Sapiens
GSER

SEQ ID NO: 18024 - protein, 5 aa, Homo Sapiens
GLKPG

SEQ ID NO: 18025 - protein, 7 aa, Homo Sapiens
KGGHRSN

SEQ ID NO: 18026 - protein, 107 aa, Homo Sapiens
GVQVETISPGDGRTFPKRGQTCVVHYTGMLEDGKKVDSSRDRNKPFKFMLGKQEVIRGWEEGVAQMSVGQRAKLTISPDYAYGATGHPGIIPPHATLVFDVELLKLE

SEQ ID NO: 18027 - DNA, 321 bp, Homo Sapiens
ggggtccaggtcgagactatttcaccaggggatgggcgaacatttccaaaaaggggccagacttgcgtcgtgcattacaccgggatgctggaggacgggaagaaagtggacagctccagggatcgcaacaagcccttcaagttcatgctgggaaagcaggaagtgatccgaggatgggaggaaggcgtggcacagatgtcagtcggccagcgggccaaactgaccattagccctgactacgcttatggagcaacaggccacccagggatcattccccctcatgccaccctggtcttcgatgtggaactgctgaagctggag

SEQ ID NO: 18028 - protein, 5 aa, Artificial Sequence
  Synthetic Sequence
GGGGS

SEQ ID NO: 18029 - DNA, 15 bp, Artificial Sequence
  Synthetic Sequence
ggaggaggaggatcc

SEQ ID NO: 18030 - protein, 282 aa, Artificial Sequence
  Synthetic Sequence
GFGDVGALESLRGNADLAYILSMEPCGHCLIINNVNFCRESGLRTRTGSNIDCEKLRRRFSSLHFMVEVKGDLTAKKMVLALLELAQQDHGALDCCVVVILSHGCQASHLQFPGAVYGTDGCPVSVEKIVNIFNGTSCPSLGGKPKLFFIQACGGEQKDHGFEVASTSPEDESPGSNPEPDATPFQEGLRTFDQLDAISSLPTPSDIFVSYSTFPGFVSWRDPKSGSWYVETLDDIFEQWAHSEDLQSLLLRVANAVSVKGIYKQMPGCFNFLRKKLFFKTS

SEQ ID NO: 18031 - DNA, 846 bp, Artificial Sequence
  Synthetic Sequence
ggatttggggacgtgggggccctggagtctctgcgaggaaatgccgatctggcttacatcctgagcatggaaccctgcggccactgtctgatcattaacaatgtgaacttctgcagagaaagcggactgcgaacacggactggctccaatattgactgtgagaagctgcggagaaggttctctagtctgcactttatggtcgaagtgaaaggggatctgaccgccaagaaaatggtgctggccctgctggagctggctcagcaggaccatggagctctggattgctgcgtggtcgtgatcctgtcccacgggtgccaggcttctcatctgcagttccccggagcagtgtacggaacagacggctgtcctgtcagcgtggagaagatcgtcaacatcttcaacggcacttcttgccctagtctggggggaaagccaaaactgttctttatccaggcctgtggcggggaacagaaagatcacggcttcgaggtggccagcaccagccctgaggacgaatcaccagggagcaaccctgaaccagatgcaactccattccaggagggactgaggacctttgaccagctggatgctatctcaagcctgcccactcctagtgacattttcgtgtcttacagtaccttcccaggctttgtctcatggcgcgatcccaagtcagggagctggtacgtggagacactggacgacatctttgaacagtgggcccattcagaggacctgcagagcctgctgctgcgagtggcaaacgctgtctctgtgaagggcatctacaaacagatgcccgggtgcttcaattttctgagaaagaaactgttctttaagacttcc

SEQ ID NO: 18032 - protein, 394 aa, Artificial Sequence
  Synthetic Sequence
GVQVETISPGDGRTFPKRGQTCVVHYTGMLEDGKKVDSSRDRNKPFKFMLGKQEVIRGWEEGVAQMSVGQRAKLTISPDYAYGATGHPGIIPPHATLVFDVELLKLEGGGGSGFGDVGALESLRGNADLAYILSMEPCGHCLIINNVNFCRESGLRTRTGSNIDCEKLRRRFSSLHFMVEVKGDLTAKKMVLALLELAQQDHGALDCCVVVILSHGCQASHLQFPGAVYGTDGCPVSVEKIVNIFNGTSCPSLGGKPKLFFIQACGGEQKDHGFEVASTSPEDESPGSNPEPDATPFQEGLRTFDQLDAISSLPTPSDIFVSYSTFPGFVSWRDPKSGSWYVETLDDIFEQWAHSEDLQSLLLRVANAVSVKGIYKQMPGCFNFLRKKLFFKTS

SEQ ID NO: 18033 - DNA, 1182 bp, Artificial Sequence
  Synthetic Sequence
ggggtccaggtcgagactatttcaccaggggatgggcgaacatttccaaaaaggggccagacttgcgtcgtgcattacaccgggatgctggaggacgggaagaaagtggacagctccagggatcgcaacaagcccttcaagttcatgctgggaaagcaggaagtgatccgaggatgggaggaaggcgtggcacagatgtcagtcggccagcgggccaaactgaccattagccctgactacgcttatggagcaacaggccacccagggatcattccccctcatgccaccctggtcttcgatgtggaactgctgaagctggagggaggaggaggatccggatttggggacgtgggggccctggagtctctgcgaggaaatgccgatctggcttacatcctgagcatggaaccctgcggccactgtctgatcattaacaatgtgaacttctgcagagaaagcggactgcgaacacggactggctccaatattgactgtgagaagctgcggagaaggttctctagtctgcactttatggtcgaagtgaaaggggatctgaccgccaagaaaatggtgctggccctgctggagctggctcagcaggaccatggagctctggattgctgcgtggtcgtgatcctgtcccacgggtgccaggcttctcatctgcagttccccggagcagtgtacggaacagacggctgtcctgtcagcgtggagaagatcgtcaacatcttcaacggcacttcttgccctagtctggggggaaagccaaaactgttctttatccaggcctgtggcggggaacagaaagatcacggcttcgaggtggccagcaccagccctgaggacgaatcaccagggagcaaccctgaaccagatgcaactccattccaggagggactgaggacctttgaccagctggatgctatctcaagcctgcccactcctagtgacattttcgtgtcttacagtaccttcccaggctttgtctcatggcgcgatcccaagtcagggagctggtacgtggagacactggacgacatctttgaacagtgggcccattcagaggacctgcagagcctgctgctgcgagtggcaaacgctgtctctgtgaagggcatctacaaacagatgcccgggtgcttcaattttctgagaaagaaactgttctttaagacttcc

SEQ ID NO: 18034 - DNA, 11 bp, Artificial Sequence
  Synthetic Sequence
  misc_feature (10)..(10): n is a, c, g, or t
grgstcgdvng

SEQ ID NO: 18035 - DNA, 11 bp, Artificial Sequence
  Synthetic Sequence
  misc_feature (10)..(10): n is a, c, g, or t
grgstcgdvng

SEQ ID NO: 18036 - DNA, 14 bp, Artificial Sequence
  Synthetic Sequence
  misc_feature (13)..(13): n is a, c, g, or t
gsggrgstcgdvng

SEQ ID NO: 18037 - DNA, 14 bp, Artificial Sequence
  Synthetic Sequence
  misc_feature (13)..(13): n is a, c, g, or t
gsggrgstcgdvng

SEQ ID NO: 18038 - DNA, 63 bp, Artificial Sequence
  Synthetic Sequence
ggatctggagagggaaggggaagcctgctgacctgtggagacgtggaggaaaacccaggacca

SEQ ID NO: 18039 - protein, 20 aa, Artificial Sequence
  Synthetic Sequence
QCTNYALLKLAGDVESNPGP

SEQ ID NO: 18040 - protein, 20 aa, Artificial Sequence
  Synthetic Sequence
QCTNYALLKLAGDVESNPGP

SEQ ID NO: 18041 - protein, 23 aa, Artificial Sequence
  Synthetic Sequence
GSGQCTNYALLKLAGDVESNPGP

SEQ ID NO: 18042 - protein, 23 aa, Artificial Sequence
  Synthetic Sequence
GSGQCTNYALLKLAGDVESNPGP

SEQ ID NO: 18043 - protein, 22 aa, Artificial Sequence
  Synthetic Sequence
VKQTLNFDLLKLAGDVESNPGP

SEQ ID NO: 18044 - protein, 22 aa, Artificial Sequence
  Synthetic Sequence
VKQTLNFDLLKLAGDVESNPGP

SEQ ID NO: 18045 - protein, 25 aa, Artificial Sequence
  Synthetic Sequence
GSGVKQTLNFDLLKLAGDVESNPGP

SEQ ID NO: 18046 - protein, 25 aa, Artificial Sequence
  Synthetic Sequence
GSGVKQTLNFDLLKLAGDVESNPGP

SEQ ID NO: 18047 - protein, 19 aa, Artificial Sequence
  Synthetic Sequence
ATNFSLLKQAGDVEENPGP

SEQ ID NO: 18048 - protein, 19 aa, Artificial Sequence
  Synthetic Sequence
ATNFSLLKQAGDVEENPGP

SEQ ID NO: 18049 - protein, 21 aa, Artificial Sequence
  Synthetic Sequence
GSGATNFSLLKQAGDVEENPG

SEQ ID NO: 18050 - protein, 22 aa, Artificial Sequence
  Synthetic Sequence
GSGATNFSLLKQAGDVEENPGP

SEQ ID NO: 18051 - DNA, 4897 bp, Artificial Sequence
  Synthetic Sequence
tgtacatagattaaccctagaaagataatcatattgtgacgtacgttaaagataatcatgcgtaaaattgacgcatgtgttttatcggtctgtatatcgaggtttatttattaatttgaatagatattaagttttattatatttacacttacatactaataataaattcaacaaacaatttatttatgtttatttatttattaaaaaaaaacaaaaactcaaaatttcttctataaagtaacaaaacttttatcgaatacctgcagcccgggggatgcagagggacagcccccccccaaagcccccagggatgtaattacgtccctcccccgctagggggcagcagcgagccgcccggggctccgctccggtccggcgctccccccgcatccccgagccggcagcgtgcggggacagcccgggcacggggaaggtggcacgggatcgctttcctctgaacgcttctcgctgctctttgagcctgcagacacctggggggatacggggaaaagttgactgtgcctttcgatcgaaccatggacagttagctttgcaaagatggataaagttttaaacagagaggaatctttgcagctaatggaccttctaggtcttgaaaggagtgggaattggctccggtgcccgtcagtgggcagagcgcacatcgcccacagtccccgagaagttggggggaggggtcggcaattgaaccggtgcctagagaaggtggcgcggggtaaactgggaaagtgatgtcgtgtactggctccgcctttttcccgagggtgggggagaaccgtatataagtgcagtagtcgccgtgaacgttctttttcgcaacgggtttgccgccagaacacaggtaagtgccgtgtgtggttcccgcgggcctggcctctttacgggttatggcccttgcgtgccttgaattacttccacctggctgcagtacgtgattcttgatcccgagcttcgggttggaagtgggtgggagagttcgaggccttgcgcttaaggagccccttcgcctcgtgcttgagttgaggcctggcctgggcgctggggccgccgcgtgcgaatctggtggcaccttcgcgcctgtctcgctgctttcgataagtctctagccatttaaaatttttgatgacctgctgcgacgctttttttctggcaagatagtcttgtaaatgcgggccaagatctgcacactggtatttcggtttttggggccgcgggcggcgacggggcccgtgcgtcccagcgcacatgttcggcgaggcggggcctgcgagcgcggccaccgagaatcggacgggggtagtctcaagctggccggcctgctctggtgcctggcctcgcgccgccgtgtatcgccccgccctgggcggcaaggctggcccggtcggcaccagttgcgtgagcggaaagatggccgcttcccggccctgctgcagggagctcaaaatggaggacgcggcgctcgggagagcgggcgggtgagtcacccacacaaaggaaaagggcctttccgtcctcagccgtcgcttcatgtgactccacggagtaccgggcgccgtccaggcacctcgattagttctcgagcttttggagtacgtcgtctttaggttggggggaggggttttatgcgatggagtttccccacactgagtgggtggagactgaagttaggccagcttggcacttgatgtaattctccttggaatttgccctttttgagtttggatcttggttcattctcaagcctcagacagtggttcaaagtttttttcttccatttcaggtgtcgtgagaattctaatacgactcactatagggtgtgctgtctcatcattttggcaaagattggccaccaagcttgtcctgcaggagggtcgacgcctctagacgggcggccgctccggatccacgggtaccgatcacatatgcctttaattaaacactagttctatagtgtcacctaaattccctttagtgagggttaatggccgtaggccgccagaattgggtccagacatgataagatacattgatgagtttggacaaaccacaactagaatgcagtgaaaaaaatgctttatttgtgaaatttgtgatgctattgctttatttgtaaccattataagctgcaataaacaagttaacaacaacaattgcattcattttatgtttcaggttcagggggaggtgtgggaggttttttcggactctaggacctgcgcatgcgcttggcgtaatcatggtcatagctgtttcctgttttccccgtatccccccaggtgtctgcaggctcaaagagcagcgagaagcgttcagaggaaagcgatcccgtgccaccttccccgtgcccgggctgtccccgcacgctgccggctcggggatgcggggggagcgccggaccggagcggagccccgggcggctcgctgctgccccctagcgggggagggacgtaattacatccctgggggctttgggggggggctgtccctctcaccgcggtggagctccagcttttgttcgaattggggccccccctcgagggtatcgatgatatctataacaagaaaatatatatataataagttatcacgtaagtagaacatgaaataacaatataattatcgtatgagttaaatcttaaaagtcacgtaaaagataatcatgcgtcattttgactcacgcggtcgttatagttcaaaatcagtgacacttaccgcattgacaagcacgcctcacgggagctccaagcggcgactgagatgtcctaaatgcacagcgacggattcgcgctatttagaaagagagagcaatatttcaagaatgcatgcgtcaattttacgcagactatctttctagggttaatctagctagccttaagggcgcctattgcgttgcgctcactgcccgctttccagtcgggaaacctgtcgtgccagctgcattaatgaatcggccaacgcgcggggagaggcggtttgcgtattgggcgctcttccgcttcctcgctcactgactcgctgcgctcggtcgttcggctgcggcgagcggtatcagctcactcaaaggcggtaatacggttatccacagaatcaggggataacgcaggaaagaacatgaccaaaatcccttaacgtgagttttcgttccactgagcgtcagaccccgtagaaaagatcaaaggatcttcttgagatcctttttttctgcgcgtaatctgctgcttgcaaacaaaaaaaccaccgctaccagcggtggtttgtttgccggatcaagagctaccaactctttttccgaaggtaactggcttcagcagagcgcagataccaaatactgttcttctagtgtagccgtagttaggccaccacttcaagaactctgtagcaccgcctacatacctcgctctgctaatcctgttaccagtggctgctgccagtggcgataagtcgtgtcttaccgggttggactcaagacgatagttaccggataaggcgcagcggtcgggctgaacggggggttcgtgcacacagcccagcttggagcgaacgacctacaccgaactgagatacctacagcgtgagctatgagaaagcgccacgcttcccgaagggagaaaggcggacaggtatccggtaagcggcagggtcggaacaggagagcgcacgagggagcttccagggggaaacgcctggtatctttatagtcctgtcgggtttcgccacctctgacttgagcgtcgatttttgtgatgctcgtcaggggggcggagcctatggaaaaacgccagcaacgcggcctttttacggttcctggccttttgctggccttttgctcacatgagattatcaaaaaggatcttcacctagatccttttaaattaaaaatgaagttttaaatcaatctaaagtatatatgagtaaacttggtctgacagtcagaagaactcgtcaagaaggcgatagaaggcgatgcgctgcgaatcgggagcggcgataccgtaaagcacgaggaagcggtcagcccattcgccgccaagctcttcagcaatatcacgggtagccaacgctatgtcctgatagcggtccgccacacccagccggccacagtcgatgaatccagaaaagcggccattttccaccatgatattcggcaagcaggcatcgccatgggtcacgacgagatcctcgccgtcgggcatgctcgccttgagcctggcgaacagttcggctggcgcgagcccctgatgctcttcgtccagatcatcctgatcgacaagaccggcttccatccgagtacgtgctcgctcgatgcgatgtttcgcttggtggtcgaatgggcaggtagccggatcaagcgtatgcagccgccgcattgcatcagccatgatggatactttctcggcaggagcaaggtgagatgacaggagatcctgccccggcacttcgcccaatagcagccagtcccttcccgcttcagtgacaacgtcgagcacagctgcgcaaggaacgcccgtcgtggccagccacgatagccgcgctgcctcgtcttgcagttcattcagggcaccggacaggtcggtcttgacaaaaagaaccgggcgcccctgcgctgacagccggaacacggcggcatcagagcagccgattgtctgttgtgcccagtcatagccgaatagcctctccacccaagcggccggagaacctgcgtgcaatccatcttgttcaatcataatattattgaagcatttatcagggttcgtctcgtcccggtctcctcccaatgcatgtcaatattggccattagccatattattcattggttatatagcataaatcaatattggctattggccattgcatacgttgtatctatatcataata

SEQ ID NO: 18052 - protein, 1053 aa, Staphylococcus aureus
MKRNYILGLDIGITSVGYGIIDYETRDVIDAGVRLFKEANVENNEGRRSKRGARRLKRRRRHRIQRVKKLLFDYNLLTDHSELSGINPYEARVKGLSQKLSEEEFSAALLHLAKRRGVHNVNEVEEDTGNELSTKEQISRNSKALEEKYVAELQLERLKKDGEVRGSINRFKTSDYVKEAKQLLKVQKAYHQLDQSFIDTYIDLLETRRTYYEGPGEGSPFGWKDIKEWYEMLMGHCTYFPEELRSVKYAYNADLYNALNDLNNLVITRDENEKLEYYEKFQIIENVFKQKKKPTLKQIAKEILVNEEDIKGYRVTSTGKPEFTNLKVYHDIKDITARKEIIENAELLDQIAKILTIYQSSEDIQEELTNLNSELTQEEIEQISNLKGYTGTHNLSLKAINLILDELWHTNDNQIAIFNRLKLVPKKVDLSQQKEIPTTLVDDFILSPVVKRSFIQSIKVINAIIKKYGLPNDIIIELAREKNSKDAQKMINEMQKRNRQTNERIEEIIRTTGKENAKYLIEKIKLHDMQEGKCLYSLEAIPLEDLLNNPFNYEVDHIIPRSVSFDNSFNNKVLVKQEENSKKGNRTPFQYLSSSDSKISYETFKKHILNLAKGKGRISKTKKEYLLEERDINRFSVQKDFINRNLVDTRYATRGLMNLLRSYFRVNNLDVKVKSINGGFTSFLRRKWKFKKERNKGYKHHAEDALIIANADFIFKEWKKLDKAKKVMENQMFEEKQAESMPEIETEQEYKEIFITPHQIKHIKDFKDYKYSHRVDKKPNRELINDTLYSTRKDDKGNTLIVNNLNGLYDKDNDKLKKLINKSPEKLLMYHHDPQTYQKLKLIMEQYGDEKNPLYKYYEETGNYLTKYSKKDNGPVIKKIKYYGNKLNAHLDITDDYPNSRNKVVKLSLKPYRFDVYLDNGVYKFVTVKNLDVIKKENYYEVNSKCYEEAKKLKKISNQAEFIASFYNNDLIKINGELYRVIGVNNDLLNRIEVNMIDITYREYLENMNDKRPPRIIKTIASKTQSIKKYSTDILGNLYEVKSKKHPQIIKKG

SEQ ID NO: 18053 - protein, 1053 aa, Artificial Sequence
  Synthetic Sequence
MKRNYILGLAIGITSVGYGIIDYETRDVIDAGVRLFKEANVENNEGRRSKRGARRLKRRRRHRIQRVKKLLFDYNLLTDHSELSGINPYEARVKGLSQKLSEEEFSAALLHLAKRRGVHNVNEVEEDTGNELSTKEQISRNSKALEEKYVAELQLERLKKDGEVRGSINRFKTSDYVKEAKQLLKVQKAYHQLDQSFIDTYIDLLETRRTYYEGPGEGSPFGWKDIKEWYEMLMGHCTYFPEELRSVKYAYNADLYNALNDLNNLVITRDENEKLEYYEKFQIIENVFKQKKKPTLKQIAKEILVNEEDIKGYRVTSTGKPEFTNLKVYHDIKDITARKEIIENAELLDQIAKILTIYQSSEDIQEELTNLNSELTQEEIEQISNLKGYTGTHNLSLKAINLILDELWHTNDNQIAIFNRLKLVPKKVDLSQQKEIPTTLVDDFILSPVVKRSFIQSIKVINAIIKKYGLPNDIIIELAREKNSKDAQKMINEMQKRNRQTNERIEEIIRTTGKENAKYLIEKIKLHDMQEGKCLYSLEAIPLEDLLNNPFNYEVDHIIPRSVSFDNSFNNKVLVKQEEASKKGNRTPFQYLSSSDSKISYETFKKHILNLAKGKGRISKTKKEYLLEERDINRFSVQKDFINRNLVDTRYATRGLMNLLRSYFRVNNLDVKVKSINGGFTSFLRRKWKFKKERNKGYKHHAEDALIIANADFIFKEWKKLDKAKKVMENQMFEEKQAESMPEIETEQEYKEIFITPHQIKHIKDFKDYKYSHRVDKKPNRELINDTLYSTRKDDKGNTLIVNNLNGLYDKDNDKLKKLINKSPEKLLMYHHDPQTYQKLKLIMEQYGDEKNPLYKYYEETGNYLTKYSKKDNGPVIKKIKYYGNKLNAHLDITDDYPNSRNKVVKLSLKPYRFDVYLDNGVYKFVTVKNLDVIKKENYYEVNSKCYEEAKKLKKISNQAEFIASFYNNDLIKINGELYRVIGVNNDLLNRIEVNMIDITYREYLENMNDKRPPRIIKTIASKTQSIKKYSTDILGNLYEVKSKKHPQIIKKG

SEQ ID NO: 18054 - protein, 1368 aa, Artificial Sequence
  Synthetic Sequence
  misc_feature (1)..(1): Xaa can be any naturally occurring amino acid
XDKKYSIGLAIGTNSVGWAVITDEYKVPSKKFKVLGNTDRHSIKKNLIGALLFDSGETAEATRLKRTARRRYTRRKNRICYLQEIFSNEMAKVDDSFFHRLEESFLVEEDKKHERHPIFGNIVDEVAYHEKYPTIYHLRKKLVDSTDKADLRLIYLALAHMIKFRGHFLIEGDLNPDNSDVDKLFIQLVQTYNQLFEENPINASGVDAKAILSARLSKSRRLENLIAQLPGEKKNGLFGNLIALSLGLTPNFKSNFDLAEDAKLQLSKDTYDDDLDNLLAQIGDQYADLFLAAKNLSDAILLSDILRVNTEITKAPLSASMIKRYDEHHQDLTLLKALVRQQLPEKYKEIFFDQSKNGYAGYIDGGASQEEFYKFIKPILEKMDGTEELLVKLNREDLLRKQRTFDNGSIPHQIHLGELHAILRRQEDFYPFLKDNREKIEKILTFRIPYYVGPLARGNSRFAWMTRKSEETITPWNFEEVVDKGASAQSFIERMTNFDKNLPNEKVLPKHSLLYEYFTVYNELTKVKYVTEGMRKPAFLSGEQKKAIVDLLFKTNRKVTVKQLKEDYFKKIECFDSVEISGVEDRFNASLGTYHDLLKIIKDKDFLDNEENEDILEDIVLTLTLFEDREMIEERLKTYAHLFDDKVMKQLKRRRYTGWGRLSRKLINGIRDKQSGKTILDFLKSDGFANRNFMQLIHDDSLTFKEDIQKAQVSGQGDSLHEHIANLAGSPAIKKGILQTVKVVDELVKVMGRHKPENIVIEMARENQTTQKGQKNSRERMKRIEEGIKELGSQILKEHPVENTQLQNEKLYLYYLQNGRDMYVDQELDINRLSDYDVDAIVPQSFLKDDSIDNKVLTRSDKNRGKSDNVPSEEVVKKMKNYWRQLLNAKLITQRKFDNLTKAERGGLSELDKAGFIKRQLVETRQITKHVAQILDSRMNTKYDENDKLIREVKVITLKSKLVSDFRKDFQFYKVREINNYHHAHDAYLNAVVGTALIKKYPKLESEFVYGDYKVYDVRKMIAKSEQEIGKATAKYFFYSNIMNFFKTEITLANGEIRKRPLIETNGETGEIVWDKGRDFATVRKVLSMPQVNIVKKTEVQTGGFSKESILPKRNSDKLIARKKDWDPKKYGGFDSPTVAYSVLVVAKVEKGKSKKLKSVKELLGITIMERSSFEKNPIDFLEAKGYKEVKKDLIIKLPKYSLFELENGRKRMLASAGELQKGNELALPSKYVNFLYLASHYEKLKGSPEDNEQKQLFVEQHKHYLDEIIEQISEFSKRVILADANLDKVLSAYNKHRDKPIREQAENIIHLFTLTNLGAPAAFKYFDTTIDRKRYTSTKEVLDATLIHQSITGLYETRIDLSQLGGD

SEQ ID NO: 18055 - protein, 1368 aa, Artificial Sequence
  Synthetic Sequence
MDKKYSIGLAIGTNSVGWAVITDEYKVPSKKFKVLGNTDRHSIKKNLIGALLFDSGETAEATRLKRTARRRYTRRKNRICYLQEIFSNEMAKVDDSFFHRLEESFLVEEDKKHERHPIFGNIVDEVAYHEKYPTIYHLRKKLVDSTDKADLRLIYLALAHMIKFRGHFLIEGDLNPDNSDVDKLFIQLVQTYNQLFEENPINASGVDAKAILSARLSKSRRLENLIAQLPGEKKNGLFGNLIALSLGLTPNFKSNFDLAEDAKLQLSKDTYDDDLDNLLAQIGDQYADLFLAAKNLSDAILLSDILRVNTEITKAPLSASMIKRYDEHHQDLTLLKALVRQQLPEKYKEIFFDQSKNGYAGYIDGGASQEEFYKFIKPILEKMDGTEELLVKLNREDLLRKQRTFDNGSIPHQIHLGELHAILRRQEDFYPFLKDNREKIEKILTFRIPYYVGPLARGNSRFAWMTRKSEETITPWNFEEVVDKGASAQSFIERMTNFDKNLPNEKVLPKHSLLYEYFTVYNELTKVKYVTEGMRKPAFLSGEQKKAIVDLLFKTNRKVTVKQLKEDYFKKIECFDSVEISGVEDRFNASLGTYHDLLKIIKDKDFLDNEENEDILEDIVLTLTLFEDREMIEERLKTYAHLFDDKVMKQLKRRRYTGWGRLSRKLINGIRDKQSGKTILDFLKSDGFANRNFMQLIHDDSLTFKEDIQKAQVSGQGDSLHEHIANLAGSPAIKKGILQTVKVVDELVKVMGRHKPENIVIEMARENQTTQKGQKNSRERMKRIEEGIKELGSQILKEHPVENTQLQNEKLYLYYLQNGRDMYVDQELDINRLSDYDVDAIVPQSFLKDDSIDNKVLTRSDKNRGKSDNVPSEEVVKKMKNYWRQLLNAKLITQRKFDNLTKAERGGLSELDKAGFIKRQLVETRQITKHVAQILDSRMNTKYDENDKLIREVKVITLKSKLVSDFRKDFQFYKVREINNYHHAHDAYLNAVVGTALIKKYPKLESEFVYGDYKVYDVRKMIAKSEQEIGKATAKYFFYSNIMNFFKTEITLANGEIRKRPLIETNGETGEIVWDKGRDFATVRKVLSMPQVNIVKKTEVQTGGFSKESILPKRNSDKLIARKKDWDPKKYGGFDSPTVAYSVLVVAKVEKGKSKKLKSVKELLGITIMERSSFEKNPIDFLEAKGYKEVKKDLIIKLPKYSLFELENGRKRMLASAGELQKGNELALPSKYVNFLYLASHYEKLKGSPEDNEQKQLFVEQHKHYLDEIIEQISEFSKRVILADANLDKVLSAYNKHRDKPIREQAENIIHLFTLTNLGAPAAFKYFDTTIDRKRYTSTKEVLDATLIHQSITGLYETRIDLSQLGGD

SEQ ID NO: 18056 - protein, 199 aa, Artificial Sequence
  Synthetic Sequence
EGIKSNISLLKDELRGQISHISHEYLSLIDLAFDSKQNRLFEMKVLELLVNEYGFKGRHLGGSRKPDGIVYSTTLEDNFGIIVDTKAYSEGYSLPISQADEMERYVRENSNRDEEVNPNKWWENFSEEVKKYYFVFISGSFKGKFEEQLRRLSMTTGVNGSAVNVVNLLLGAEKIRSGEMTIEELERAMFNNSEFILKY

SEQ ID NO: 18057 - protein, 1591 aa, Streptoccocus pyogenes
MAPKKKRKVEGIKSNISLLKDELRGQISHISHEYLSLIDLAFDSKQNRLFEMKVLELLVNEYGFKGRHLGGSRKPDGIVYSTTLEDNFGIIVDTKAYSEGYSLPISQADEMERYVRENSNRDEEVNPNKWWENFSEEVKKYYFVFISGSFKGKFEEQLRRLSMTTGVNGSAVNVVNLLLGAEKIRSGEMTIEELERAMFNNSEFILKYGGGGSDKKYSIGLAIGTNSVGWAVITDEYKVPSKKFKVLGNTDRHSIKKNLIGALLFDSGETAEATRLKRTARRRYTRRKNRICYLQEIFSNEMAKVDDSFFHRLEESFLVEEDKKHERHPIFGNIVDEVAYHEKYPTIYHLRKKLVDSTDKADLRLIYLALAHMIKFRGHFLIEGDLNPDNSDVDKLFIQLVQTYNQLFEENPINASGVDAKAILSARLSKSRRLENLIAQLPGEKKNGLFGNLIALSLGLTPNFKSNFDLAEDAKLQLSKDTYDDDLDNLLAQIGDQYADLFLAAKNLSDAILLSDILRVNTEITKAPLSASMIKRYDEHHQDLTLLKALVRQQLPEKYKEIFFDQSKNGYAGYIDGGASQEEFYKFIKPILEKMDGTEELLVKLNREDLLRKQRTFDNGSIPHQIHLGELHAILRRQEDFYPFLKDNREKIEKILTFRIPYYVGPLARGNSRFAWMTRKSEETITPWNFEEVVDKGASAQSFIERMTNFDKNLPNEKVLPKHSLLYEYFTVYNELTKVKYVTEGMRKPAFLSGEQKKAIVDLLFKTNRKVTVKQLKEDYFKKIECFDSVEISGVEDRFNASLGTYHDLLKIIKDKDFLDNEENEDILEDIVLTLTLFEDREMIEERLKTYAHLFDDKVMKQLKRRRYTGWGRLSRKLINGIRDKQSGKTILDFLKSDGFANRNFMQLIHDDSLTFKEDIQKAQVSGQGDSLHEHIANLAGSPAIKKGILQTVKVVDELVKVMGRHKPENIVIEMARENQTTQKGQKNSRERMKRIEEGIKELGSQILKEHPVENTQLQNEKLYLYYLQNGRDMYVDQELDINRLSDYDVDAIVPQSFLKDDSIDNKVLTRSDKNRGKSDNVPSEEVVKKMKNYWRQLLNAKLITQRKFDNLTKAERGGLSELDKAGFIKRQLVETRQITKHVAQILDSRMNTKYDENDKLIREVKVITLKSKLVSDFRKDFQFYKVREINNYHHAHDAYLNAVVGTALIKKYPKLESEFVYGDYKVYDVRKMIAKSEQEIGKATAKYFFYSNIMNFFKTEITLANGEIRKRPLIETNGETGEIVWDKGRDFATVRKVLSMPQVNIVKKTEVQTGGFSKESILPKRNSDKLIARKKDWDPKKYGGFDSPTVAYSVLVVAKVEKGKSKKLKSVKELLGITIMERSSFEKNPIDFLEAKGYKEVKKDLIIKLPKYSLFELENGRKRMLASAGELQKGNELALPSKYVNFLYLASHYEKLKGSPEDNEQKQLFVEQHKHYLDEIIEQISEFSKRVILADANLDKVLSAYNKHRDKPIREQAENIIHLFTLTNLGAPAAFKYFDTTIDRKRYTSTKEVLDATLIHQSITGLYETRIDLSQLGGDGSPKKKRKVSS

SEQ ID NO: 18058 - DNA, 4776 bp, Streptoccocus pyogenes
atggcaccaaagaagaaaagaaaagtggagggcatcaagtcaaacatcagcctgctgaaagacgaactgcggggacagattagtcacatcagtcacgagtacctgtcactgattgatctggccttcgacagcaagcagaatagactgtttgagatgaaagtgctggaactgctggtcaacgagtatggcttcaagggcagacatctgggcgggtctaggaaacctgacggcatcgtgtacagtaccacactggaagacaacttcggaatcattgtcgataccaaggcttattccgagggctactctctgccaattagtcaggcagatgagatggaaaggtacgtgcgcgaaaactcaaatagggacgaggaagtcaaccccaataagtggtgggagaatttcagcgaggaagtgaagaaatactacttcgtctttatctcaggcagcttcaaagggaagtttgaggaacagctgcggagactgtccatgactaccggggtgaacggatctgctgtcaacgtggtcaatctgctgctgggcgcagaaaagatcaggtccggggagatgacaattgaggaactggaacgcgccatgttcaacaattctgagtttatcctgaagtatggaggcgggggaagcgataagaaatactccatcggactggccattggcaccaattccgtgggctgggctgtcatcacagacgagtacaaggtgccaagcaagaagttcaaggtcctggggaacaccgatcgccacagtatcaagaaaaatctgattggagccctgctgttcgactcaggcgagactgctgaagcaacccgactgaagcggactgctaggcgccgatatacccggagaaaaaatcggatctgctacctgcaggaaattttcagcaacgagatggccaaggtggacgatagtttctttcaccgcctggaggaatcattcctggtggaggaagataagaaacacgagcggcatcccatctttggcaacattgtggacgaagtcgcttatcacgagaagtaccctactatctatcatctgaggaagaaactggtggactccaccgataaggcagacctgcgcctgatctatctggccctggctcacatgatcaagttccgggggcattttctgatcgagggagatctgaaccctgacaattctgatgtggacaagctgttcatccagctggtccagacatacaatcagctgtttgaggaaaacccaattaatgcctcaggcgtggacgcaaaggccatcctgagcgccagactgtccaaatctaggcgcctggaaaacctgatcgctcagctgccaggagagaagaaaaacggcctgtttgggaatctgattgcactgtccctgggcctgacacccaacttcaagtctaattttgatctggccgaggacgctaagctgcagctgtccaaagacacttatgacgatgacctggataacctgctggctcagatcggcgatcagtacgcagacctgttcctggccgctaagaatctgagtgacgccatcctgctgtcagatattctgcgcgtgaacacagagattactaaggccccactgagtgcttcaatgatcaaaagatatgacgagcaccatcaggatctgaccctgctgaaggctctggtgaggcagcagctgcccgagaaatacaaggaaatcttctttgatcagagcaagaatggatacgccggctatattgacggcggggcttcccaggaggagttctacaagttcatcaagcccattctggaaaagatggacggcaccgaggaactgctggtgaagctgaatcgggaggacctgctgagaaaacagaggacatttgataacggaagcatccctcaccagattcatctgggcgaactgcacgccatcctgcgacggcaggaggacttctacccatttctgaaggataaccgcgagaaaatcgaaaagatcctgaccttcagaatcccctactatgtggggcctctggcacggggaaatagtagatttgcctggatgacaagaaagtcagaggaaactatcaccccctggaacttcgaggaagtggtcgataaaggcgctagcgcacagtccttcattgaaaggatgacaaattttgacaagaacctgccaaatgagaaggtgctgcccaaacacagcctgctgtacgaatatttcacagtgtataacgagctgactaaagtgaagtacgtcaccgaagggatgcgcaagcccgcattcctgtccggagagcagaagaaagccatcgtggacctgctgtttaagacaaatcggaaagtgactgtcaaacagctgaaggaagactatttcaagaaaattgagtgtttcgattcagtggaaatcagcggcgtcgaggacaggtttaacgcctccctggggacctaccacgatctgctgaagatcatcaaggataaggacttcctggacaacgaggaaaatgaggacatcctggaggacattgtgctgacactgactctgtttgaggatcgcgaaatgatcgaggaacgactgaagacttatgcccatctgttcgatgacaaagtgatgaagcagctgaaaagaaggcgctacaccggatggggacgcctgagccgaaaactgatcaatgggattagagacaagcagagcggaaaaactatcctggactttctgaagtccgatggcttcgccaacaggaacttcatgcagctgattcacgatgactctctgaccttcaaggaggacatccagaaagcacaggtgtctggccagggggacagtctgcacgagcatatcgcaaacctggccggcagccccgccatcaagaaagggattctgcagaccgtgaaggtggtggacgaactggtcaaggtcatgggacgacacaaacctgagaacatcgtgattgagatggcccgcgaaaatcagacaactcagaagggccagaaaaacagtcgagaacggatgaagagaatcgaggaaggcatcaaggagctggggtcacagatcctgaaggagcatcctgtggaaaacactcagctgcagaatgagaaactgtatctgtactatctgcagaatggacgggatatgtacgtggaccaggagctggatattaacagactgagtgattatgacgtggatgccatcgtccctcagagcttcctgaaggatgactccattgacaacaaggtgctgaccaggtccgacaagaaccgcggcaaatcagataatgtgccaagcgaggaagtggtcaagaaaatgaagaactactggaggcagctgctgaatgccaagctgatcacacagcggaaatttgataacctgactaaggcagaaagaggaggcctgtctgagctggacaaggccggcttcatcaagcggcagctggtggagacaagacagatcactaagcacgtcgctcagattctggatagcagaatgaacacaaagtacgatgaaaacgacaagctgatcagggaggtgaaagtcattactctgaaatccaagctggtgtctgactttagaaaggatttccagttttataaagtcagggagatcaacaactaccaccatgctcatgacgcatacctgaacgcagtggtcgggaccgccctgattaagaaataccccaagctggagtccgagttcgtgtacggagactataaagtgtacgatgtccggaagatgatcgccaaatctgagcaggaaattggcaaggccaccgctaagtatttcttttacagtaacatcatgaatttctttaagaccgaaatcacactggcaaatggggagatcagaaaaaggcctctgattgagaccaacggggagacaggagaaatcgtgtgggacaagggaagggattttgctaccgtgcgcaaagtcctgtccatgccccaagtgaatattgtcaagaaaactgaagtgcagaccgggggattctctaaggagagtattctgcctaagcgaaactctgataaactgatcgcccggaagaaagactgggaccccaagaagtatggcgggttcgactctccaacagtggcttacagtgtcctggtggtcgcaaaggtggaaaaggggaagtccaagaaactgaagtctgtcaaagagctgctgggaatcactattatggaacgcagctccttcgagaagaatcctatcgattttctggaagccaagggctataaagaggtgaagaaagacctgatcattaagctgccaaaatactcactgtttgagctggaaaacggacgaaagcgaatgctggcaagcgccggagaactgcagaagggcaatgagctggccctgccctccaaatacgtgaacttcctgtatctggctagccactacgagaaactgaaggggtcccctgaggataacgaacagaagcagctgtttgtggagcagcacaaacattatctggacgagatcattgaacagatttcagagttcagcaagagagtgatcctggctgacgcaaatctggataaagtcctgagcgcatacaacaagcaccgagacaaaccaatccgggagcaggccgaaaatatcattcatctgttcaccctgacaaacctgggcgcccctgcagccttcaagtattttgacaccacaatcgatcggaagagatacacttctaccaaagaggtgctggatgctaccctgatccaccagagtattaccggcctgtatgagacacgcatcgacctgtcacagctgggaggcgatgggagccccaagaaaaagcggaaggtgtctagttaa

SEQ ID NO: 18059 - protein, 1588 aa, Streptoccocus pyogenes
MPKKKRKVEGIKSNISLLKDELRGQISHISHEYLSLIDLAFDSKQNRLFEMKVLELLVNEYGFKGRHLGGSRKPDGIVYSTTLEDNFGIIVDTKAYSEGYSLPISQADEMERYVRENSNRDEEVNPNKWWENFSEEVKKYYFVFISGSFKGKFEEQLRRLSMTTGVNGSAVNVVNLLLGAEKIRSGEMTIEELERAMFNNSEFILKYGGGGSDKKYSIGLAIGTNSVGWAVITDEYKVPSKKFKVLGNTDRHSIKKNLIGALLFDSGETAEATRLKRTARRRYTRRKNRICYLQEIFSNEMAKVDDSFFHRLEESFLVEEDKKHERHPIFGNIVDEVAYHEKYPTIYHLRKKLVDSTDKADLRLIYLALAHMIKFRGHFLIEGDLNPDNSDVDKLFIQLVQTYNQLFEENPINASGVDAKAILSARLSKSRRLENLIAQLPGEKKNGLFGNLIALSLGLTPNFKSNFDLAEDAKLQLSKDTYDDDLDNLLAQIGDQYADLFLAAKNLSDAILLSDILRVNTEITKAPLSASMIKRYDEHHQDLTLLKALVRQQLPEKYKEIFFDQSKNGYAGYIDGGASQEEFYKFIKPILEKMDGTEELLVKLNREDLLRKQRTFDNGSIPHQIHLGELHAILRRQEDFYPFLKDNREKIEKILTFRIPYYVGPLARGNSRFAWMTRKSEETITPWNFEEVVDKGASAQSFIERMTNFDKNLPNEKVLPKHSLLYEYFTVYNELTKVKYVTEGMRKPAFLSGEQKKAIVDLLFKTNRKVTVKQLKEDYFKKIECFDSVEISGVEDRFNASLGTYHDLLKIIKDKDFLDNEENEDILEDIVLTLTLFEDREMIEERLKTYAHLFDDKVMKQLKRRRYTGWGRLSRKLINGIRDKQSGKTILDFLKSDGFANRNFMQLIHDDSLTFKEDIQKAQVSGQGDSLHEHIANLAGSPAIKKGILQTVKVVDELVKVMGRHKPENIVIEMARENQTTQKGQKNSRERMKRIEEGIKELGSQILKEHPVENTQLQNEKLYLYYLQNGRDMYVDQELDINRLSDYDVDAIVPQSFLKDDSIDNKVLTRSDKNRGKSDNVPSEEVVKKMKNYWRQLLNAKLITQRKFDNLTKAERGGLSELDKAGFIKRQLVETRQITKHVAQILDSRMNTKYDENDKLIREVKVITLKSKLVSDFRKDFQFYKVREINNYHHAHDAYLNAVVGTALIKKYPKLESEFVYGDYKVYDVRKMIAKSEQEIGKATAKYFFYSNIMNFFKTEITLANGEIRKRPLIETNGETGEIVWDKGRDFATVRKVLSMPQVNIVKKTEVQTGGFSKESILPKRNSDKLIARKKDWDPKKYGGFDSPTVAYSVLVVAKVEKGKSKKLKSVKELLGITIMERSSFEKNPIDFLEAKGYKEVKKDLIIKLPKYSLFELENGRKRMLASAGELQKGNELALPSKYVNFLYLASHYEKLKGSPEDNEQKQLFVEQHKHYLDEIIEQISEFSKRVILADANLDKVLSAYNKHRDKPIREQAENIIHLFTLTNLGAPAAFKYFDTTIDRKRYTSTKEVLDATLIHQSITGLYETRIDLSQLGGDGSPKKKRKV

SEQ ID NO: 18060 - DNA, 4767 bp, Streptoccocus pyogenes
atgcctaagaagaagcggaaggtggaaggcatcaaaagcaacatctccctcctgaaagacgaactccgggggcagattagccacattagtcacgaatacctctccctcatcgacctggctttcgatagcaagcagaacaggctctttgagatgaaagtgctggaactgctcgtcaatgagtacgggttcaagggtcgacacctcggcggatctaggaaaccagacggcatcgtgtatagtaccacactggaagacaactttgggatcattgtggataccaaggcatactctgagggttatagtctgcccatttcacaggccgacgagatggaacggtacgtgcgcgagaactcaaatagagatgaggaagtcaaccctaacaagtggtgggagaacttctctgaggaagtgaagaaatactacttcgtctttatcagcgggtccttcaagggtaaatttgaggaacagctcaggagactgagcatgactaccggcgtgaatggcagcgccgtcaacgtggtcaatctgctcctgggcgctgaaaagattcggagcggagagatgaccatcgaagagctggagagggcaatgtttaataatagcgagtttatcctgaaatacggtggcggtggatccgataaaaagtattctattggtttagccatcggcactaattccgttggatgggctgtcataaccgatgaatacaaagtaccttcaaagaaatttaaggtgttggggaacacagaccgtcattcgattaaaaagaatcttatcggtgccctcctattcgatagtggcgaaacggcagaggcgactcgcctgaaacgaaccgctcggagaaggtatacacgtcgcaagaaccgaatatgttacttacaagaaatttttagcaatgagatggccaaagttgacgattctttctttcaccgtttggaagagtccttccttgtcgaagaggacaagaaacatgaacggcaccccatctttggaaacatagtagatgaggtggcatatcatgaaaagtacccaacgatttatcacctcagaaaaaagctagttgactcaactgataaagcggacctgaggttaatctacttggctcttgcccatatgataaagttccgtgggcactttctcattgagggtgatctaaatccggacaactcggatgtcgacaaactgttcatccagttagtacaaacctataatcagttgtttgaagagaaccctataaatgcaagtggcgtggatgcgaaggctattcttagcgcccgcctctctaaatcccgacggctagaaaacctgatcgcacaattacccggagagaagaaaaatgggttgttcggtaaccttatagcgctctcactaggcctgacaccaaattttaagtcgaacttcgacttagctgaagatgccaaattgcagcttagtaaggacacgtacgatgacgatctcgacaatctactggcacaaattggagatcagtatgcggacttatttttggctgccaaaaaccttagcgatgcaatcctcctatctgacatactgagagttaatactgagattaccaaggcgccgttatccgcttcaatgatcaaaaggtacgatgaacatcaccaagacttgacacttctcaaggccctagtccgtcagcaactgcctgagaaatataaggaaatattctttgatcagtcgaaaaacgggtacgcaggttatattgacggcggagcgagtcaagaggaattctacaagtttatcaaacccatattagagaagatggatgggacggaagagttgcttgtaaaactcaatcgcgaagatctactgcgaaagcagcggactttcgacaacggtagcattccacatcaaatccacttaggcgaattgcatgctatacttagaaggcaggaggatttttatccgttcctcaaagacaatcgtgaaaagattgagaaaatcctaacctttcgcataccttactatgtgggacccctggcccgagggaactctcggttcgcatggatgacaagaaagtccgaagaaacgattactccatggaattttgaggaagttgtcgataaaggtgcgtcagctcaatcgttcatcgagaggatgaccaactttgacaagaatttaccgaacgaaaaagtattgcctaagcacagtttactttacgagtatttcacagtgtacaatgaactcacgaaagttaagtatgtcactgagggcatgcgtaaacccgcctttctaagcggagaacagaagaaagcaatagtagatctgttattcaagaccaaccgcaaagtgacagttaagcaattgaaagaggactactttaagaaaattgaatgcttcgattctgtcgagatctccggggtagaagatcgatttaatgcgtcacttggtacgtatcatgacctcctaaagataattaaagataaggacttcctggataacgaagagaatgaagatatcttagaagatatagtgttgactcttaccctctttgaagatcgggaaatgattgaggaaagactaaaaacatacgctcacctgttcgacgataaggttatgaaacagttaaagaggcgtcgctatacgggctggggacgattgtcgcggaaacttatcaacgggataagagacaagcaaagtggtaaaactattctcgattttctaaagagcgacggcttcgccaataggaactttatgcagctgatccatgatgactctttaaccttcaaagaggatatacaaaaggcacaggtttccggacaaggggactcattgcacgaacatattgcgaatcttgctggttcgccagccatcaaaaagggcatactccagacagtcaaagtagtggatgagctagttaaggtcatgggacgtcacaaaccggaaaacattgtaatcgagatggcacgcgaaaatcaaacgactcagaaggggcaaaaaaacagtcgagagcggatgaagagaatagaagagggtattaaagaactgggcagccagatcttaaaggagcatcctgtggaaaatacccaattgcagaacgagaaactttacctctattacctacaaaatggaagggacatgtatgttgatcaggaactggacataaaccgtttatctgattacgacgtcgatgccattgtaccccaatcctttttgaaggacgattcaatcgacaataaagtgcttacacgctcggataagaaccgagggaaaagtgacaatgttccaagcgaggaagtcgtaaagaaaatgaagaactattggcggcagctcctaaatgcgaaactgataacgcaaagaaagttcgataacttaactaaagctgagaggggtggcttgtctgaacttgacaaggccggatttattaaacgtcagctcgtggaaacccgccaaatcacaaagcatgttgcacagatactagattcccgaatgaatacgaaatacgacgagaacgataagctgattcgggaagtcaaagtaatcactttaaagtcaaaattggtgtcggacttcagaaaggattttcaattctataaagttagggagataaataactaccaccatgcgcacgacgcttatcttaatgccgtcgtagggaccgcactcattaagaaatacccgaagctagaaagtgagtttgtgtatggtgattacaaagtttatgacgtccgtaagatgatcgcgaaaagcgaacaggagataggcaaggctacagccaaatacttcttttattctaacattatgaatttctttaagacggaaatcactctggcaaacggagagatacgcaaacgacctttaattgaaaccaatggggagacaggtgaaatcgtatgggataagggccgggacttcgcgacggtgagaaaagttttgtccatgccccaagtcaacatagtaaagaaaactgaggtgcagaccggagggttttcaaaggaatcgattcttccaaaaaggaatagtgataagctcatcgctcgtaaaaaggactgggacccgaaaaagtacggtggcttcgatagccctacagttgcctattctgtcctagtagtggcaaaagttgagaagggaaaatccaagaaactgaagtcagtcaaagaattattggggataacgattatggagcgctcgtcttttgaaaagaaccccatcgacttccttgaggcgaaaggttacaaggaagtaaaaaaggatctcataattaaactaccaaagtatagtctgtttgagttagaaaatggccgaaaacggatgttggctagcgccggagagcttcaaaaggggaacgaactcgcactaccgtctaaatacgtgaatttcctgtatttagcgtcccattacgagaagttgaaaggttcacctgaagataacgaacagaagcaactttttgttgagcagcacaaacattatctcgacgaaatcatagagcaaatttcggaattcagtaagagagtcatcctagctgatgccaatctggacaaagtattaagcgcatacaacaagcacagggataaacccatacgtgagcaggcggaaaatattatccatttgtttactcttaccaacctcggcgctccagccgcattcaagtattttgacacaacgatagatcgcaaacgatacacttctaccaaggaggtgctagacgcgacactgattcaccaatccatcacgggattatatgaaactcggatagatttgtcacagcttgggggtgacggatcccccaagaagaagaggaaagtctga

SEQ ID NO: 18061 - DNA, 5296 bp, Artificial Sequence
  Synthetic Sequence
tcctatataataaaagagaaacatgcaaattgaccatccctccgctacgctcaagccacgcccaccagccaatcagaagtgactatgcaaattaacccaacaaagatggcagttaaatttgcatacgcaggtgtcaagcgccccaggaggcaacggcggccgcgggctcccaggaccttcgctggccccgggaggcgaggccggccgcgcctagccacacccgcgggctcccgggaccttcgccagcagagagcagagcgggagagcgggcggagagcgggaggtttggaggacttggcagagcaggaggccgctggacatagagcagagcgagagagagggtggcttggagggcgtggctccctctgtcaccccagcttcctcatcacagctgtggaaactgacagcagggaggaggaagtcccacccccacagaatcagccagaatcagccgttggtcagacagctctcagcggcctgacagccaggactctcattcacctgcatctcagaccgtgacagtagagaggtgggactatgtctaaagaacaactgttgatacaacgtagctctgcagccgaaagatgccggcgttatcgacagaaaatgtctgcagagcaacgtgcgtctgatcttgaaagaaggcggcgcctgcaacagaatgtatctgaagagcagctactggaaaaacgtcgctctgaagccgaaaaacagcggcgtcatcgacagaaaatgtctaaagaccaacgtgcctttgaagttgaaagaaggcggtggcgacgacagaatatgtctagagaacagtcatcaacaagtactaccaataccggtaggaactgccttctcagcaaaaatggagtacatgaggatgcaattctcgaacatagttgtggtggaatgactgttcgatgtgaattttgcctatcactaaatttctctgatgaaaaaccatccgatgggaaatttactcgatgttgtagcaaagggaaagtctgtccaaatgatatacattttccagattacccggcatatttaaaaagattaatgacaaacgaagattctgacagtaaaaatttcatggaaaatattcgttccataaatagttcttttgcttttgcttccatgggtgcaaatattgcatcgccatcaggatatgggccatactgttttagaatacacggacaagtttatcaccgtactggaactttacatccttcggatggtgtttctcggaagtttgctcaactctatattttggatacagccgaagctacaagtaaaagattagcaatgccagaaaaccagggctgctcagaaagactcatgatcaacatcaacaacctcatgcatgaaataaatgaattaacaaaatcgtacaagatgctacatgaggtagaaaaggaagcccaatctgaagcagcagcaaaaggtattgctcccacagaagtaacaatggcgattaaatacgatcgtaacagtgacccaggtagatataattctccccgtgtaaccgaggttgctgtcatattcagaaacgaagatggagaacctccttttgaaagggacttgctcattcattgtaaaccagatcccaataatccaaatgccactaaaatgaaacaaatcagtatcctgtttcctacattagatgcaatgacatatcctattctttttccacatggtgaaaaaggctggggaacagatattgcattaagactcagagacaacagtgtaatcgacaataatactagacaaaatgtaaggacacgagtcacacaaatgcagtattatggatttcatctctctgtgcgggacacgttcaatcctattttaaatgcaggaaaattaactcaacagtttattgtggattcatattcaaaaatggaggccaatcggataaatttcatcaaagcaaaccaatctaagttgagagttgaaaaatatagtggtttgatggattatctcaaatctagatctgaaaatgacaatgtgccgattggtaaaatgataatacttccatcatcttttgagggtagtcccagaaatatgcagcagcgatatcaggatgctatggcaattgtaacgaagtatggcaagcccgatttattcataaccatgacatgcaaccccaaatgggcagatattacaaacaatttacaacgctggcaaaaagttgaaaacagacctgacttggtagccagagtttttaatattaagctgaatgctcttttaaatgatatatgtaaattccatttatttggcaaagtaatagctaaaattcatgtcattgaatttcagaaacgcggactgcctcacgctcacatattattgatattagatagtgagtccaaattacgttcagaagatgacattgaccgtatagttaaggcagaaattccagatgaagaccagtgtcctcgactttttcaaattgtaaaatcaaatatggtacatggaccatgtggaatacaaaatccaaatagtccatgtatggaaaatggaaaatgttcaaagggatatccaaaagaatttcaaaatgcgaccattggaaatattgatggatatcccaaatacaaacgaagatctggtagcaccatgtctattggaaataaagttgtcgataacacttggattgtcccttataacccgtatttgtgccttaaatataactgtcatataaatgttgaagtctgtgcatcaattaaaagtgtcaaatatttatttaaatacatctataaagggcacgattgtgcaaatattcaaatttctgaaaaaaatattatcaatcatgacgaagtacaggacttcattgactccaggtatgtgagcgctcctgaggctgtttggagactttttgcaatgcgaatgcatgaccaatctcatgcaatcacaagattagctattcatttgccaaatgatcagaatttgtattttcataccgatgattttgctgaagttttagatagggctaaaaggcataactcgactttgatggcttggttcttattgaatagagaagattctgatgcacgtaattattattattgggagattccacagcattatgtgtttaataattctttgtggacaaaacgccgaaagggtgggaataaagtattaggtagactgttcactgtgagctttagagaaccagaacgatattaccttagacttttgcttctgcatgtaaaaggtgcgataagttttgaggatctgcgaactgtaggaggtgtaacttatgatacatttcatgaagctgctaaacaccgaggattattacttgatgacactatctggaaagatacgattgacgatgcaatcatccttaatatgcccaaacaactacggcaactttttgcatatatatgtgtgtttggatgtccttctgctgcagacaaattatgggatgagaataaatctcattttattgaagatttctgttggaaattacaccgaagagaaggtgcctgtgtgaactgtgaaatgcatgcccttaacgaaattcaggaggtattcacattgcatggaatgaaatgttcacatttcaaacttccggactatcctttattaatgaatgcaaatacatgtgatcaattgtacgagcaacaacaggcagaggttttgataaattctctgaatgatgaacagttggcagcctttcagactataacttcagccatcgaagatcaaactgtacaccccaaatgctttttcttggatggtccaggtggtagtggaaaaacatatctgtataaagttttaacacattatattagaggtcgtggtggtactgttttacccacagcatctacaggaattgctgcaaatttacttcttggtggaagaacctttcattcccaatataaattaccaattccattaaatgaaacttcaatttctagactcgatataaagagtgaagttgctaaaaccattaaaaaggcccaacttctcattattgatgaatgcaccatggcatccagtcatgctataaacgccatagatagattactaagagaaattatgaatttgaatgttgcatttggtgggaaagttctccttctcggaggggattttcgacaatgtctcagtattgtaccacatgctatgcgatcggccatagtacaaacgagtttaaagtactgtaatgtttggggatgtttcagaaagttgtctcttaaaacaaatatgagatcagaggattctgcttatagtgaatggttagtaaaacttggagatggcaaacttgatagcagttttcatttaggaatggatattattgaaatcccccatgaaatgatttgtaacggatctattattgaagctacctttggaaatagtatatctatagataatattaaaaatatatctaaacgtgcaattctttgtccaaaaaatgagcatgttcaaaaattaaatgaagaaattttggatatacttgatggagattttcacacatatttgagtgatgattccattgattcaacagatgatgctgaaaaggaaaattttcccatcgaatttcttaatagtattactccttcgggaatgccgtgtcataaattaaaattgaaagtgggtgcaatcatcatgctattgagaaatcttaatagtaaatggggtctttgtaatggtactagatttattatcaaaagattacgacctaacattatcgaagctgaagtattaacaggatctgcagagggagaggttgttctgattccaagaattgatttgtccccatctgacactggcctcccatttaaattaattcgaagacagtttcccgtgatgccagcatttgcgatgactattaataaatcacaaggacaaactctagacagagtaggaatattcctacctgaacccgttttcgcacatggtcagttatatgttgctttctctcgagttcgaagagcatgtgacgttaaagttaaagttgtaaatacttcatcacaagggaaattagtcaagcactctgaaagtgtttttactcttaatgtggtatacagggagatattagaataagtttaatcactttatcagtcattgtttgcatcaatgttgtttttatatcatgtttttgttgtttttatatcatgtctttgttgttgttatatcatgttgttattgtttatttattaataaatttatgtattattttcatatacattttactcatttcctttcatctctcacacttctattatagagaaagggcaaatagcaatattaaaatatttcctctaattaattccctttcaatgtgcacgaatttcgtgcaccgggccactag

SEQ ID NO: 18062 - DNA, 4682 bp, Artificial Sequence
  Synthetic Sequence
cagaggtgtaaagtacttgagtaattttacttgattactgtacttaagtattatttttggggatttttactttacttgagtacaattaaaaatcaatacttttacttttacttaattacatttttttagaaaaaaaagtactttttactccttacaattttatttacagtcaaaaagtacttattttttggagatcacttcattctattttcccttgctattaccaaaccaattgaattgcgctgatgcccagtttaatttaaatgttatttattctgcctatgaaaatcgttttcacattatatgaaattggtcagacatgttcattggtcctttggaagtgacgtcatgtcacatctattaccacaatgcacagcaccttgacctggaaattagggaaattataacagtcaatcagtggaagaaaatggaggaagtatgtgattcatcagcagctgcgagcagcacagtccaaaatcagccacaggatcaagagcacccgtggccgtatcttcgcgaattcttttctttaagtggtgtaaataaagattcattcaagatgaaatgtgtcctctgtctcccgcttaataaagaaatatcggccttcaaaagttcgccatcaaacctaaggaagcatattgaggtaagtacattaagtattttgttttactgatagtttttttttttttttttttttttttttttgggtgtgcatgttttgacgttgatggcgcgccttttatatgtgtagtaggcctattttcactaatgcatgcgattgacaatataaggctcacgtaataaaatgctaaaatgcatttgtaattggtaacgttaggtccacgggaaatttggcgcctattgcagctttgaataatcattatcattccgtgctctcattgtgtttgaattcatgcaaaacacaagaaaaccaagcgagaaatttttttccaaacatgttgtattgtcaaaacggtaacactttacaatgaggttgattagttcatgtattaactaacattaaataaccatgagcaatacatttgttactgtatctgttaatctttgttaacgttagttaatagaaatacagatgttcattgtttgttcatgttagttcacagtgcattaactaatgttaacaagatataaagtattagtaaatgttgaaattaacatgtatacgtgcagttcattattagttcatgttaactaatgtagttaactaacgaaccttattgtaaaagtgttaccatcaaaactaatgtaatgaaatcaattcaccctgtcatgtcagccttacagtcctgtgtttttgtcaatataatcagaaataaaattaatgtttgattgtcactaaatgctactgtatttctaaaatcaacaagtatttaacattataaagtgtgcaattggctgcaaatgtcagttttattaaagggttagttcacccaaaaatgaaaataatgtcattaatgactcgccctcatgtcgttccaagcccgtaagacctccgttcatcttcagaacacagtttaagatattttagatttagtccgagagctttctgtgcctccattgagaatgtatgtacggtatactgtccatgtccagaaaggtaataaaaacatcaaagtagtccatgtgacatcagtgggttagttagaattttttgaagcatcgaatacattttggtccaaaaataacaaaacctacgactttattcggcattgtattctcttccgggtctgttgtcaatccgcgttcacgacttcgcagtgacgctacaatgctgaataaagtcgtaggttttgttatttttggaccaaaatgtattttcgatgcttcaaataattctacctaacccactgatgtcacatggactactttgatgtttttattacctttctggacatggacagtataccgtacatacattttcagtggagggacagaaagctctcggactaaatctaaaatatcttaaactgtgttccgaagatgaacggaggtgttacgggcttggaacgacatgagggtgagtcattaatgacatcttttcatttttgggtgaactaaccctttaatgctgtaatcagagagtgtatgtgtaattgttacatttattgcatacaatataaatatttatttgttgtttttacagagaatgcacccaaattacctcaaaaactactctaaattgacagcacagaagagaaagatcgggacctccacccatgcttccagcagtaagcaactgaaagttgactcagttttcccagtcaaacatgtgtctccagtcactgtgaacaaagctatattaaggtacatcattcaaggacttcatcctttcagcactgttgatctgccatcatttaaagagctgattagtacactgcagcctggcatttctgtcattacaaggcctactttacgctccaagatagctgaagctgctctgatcatgaaacagaaagtgactgctgccatgagtgaagttgaatggattgcaaccacaacggattgttggactgcacgtagaaagtcattcattggtgtaactgctcactggatcaaccctggaagtcttgaaagacattccgctgcacttgcctgcaaaagattaatgggctctcatacttttgaggtactggccagtgccatgaatgatatccactcagagtatgaaatacgtgacaaggttgtttgcacaaccacagacagtggttccaactttatgaaggctttcagagtttttggtgtggaaaacaatgatatcgagactgaggcaagaaggtgtgaaagtgatgacactgattctgaaggctgtggtgagggaagtgatggtgtggaattccaagatgcctcacgagtcctggaccaagacgatggcttcgaattccagctaccaaaacatcaaaagtgtgcctgtcacttacttaacctagtctcaagcgttgatgcccaaaaagctctctcaaatgaacactacaagaaactctacagatctgtctttggcaaatgccaagctttatggaataaaagcagccgatcggctctagcagctgaagctgttgaatcagaaagccggcttcagcttttaaggccaaaccaaacgcggtggaattcaacttttatggctgttgacagaattcttcaaatttgcaaagaagcaggagaaggcgcacttcggaatatatgcacctctcttgaggttccaatgtaagtgtttttcccctctatcgatgtaaacaaatgtgggttgtttttgtttaatactctttgattatgctgatttctcctgtaggtttaatccagcagaaatgctgttcttgacagagtgggccaacacaatgcgtccagttgcaaaagtactcgacatcttgcaagcggaaacgaatacacagctggggtggctgctgcctagtgtccatcagttaagcttgaaacttcagcgactccaccattctctcaggtactgtgacccacttgtggatgccctacaacaaggaatccaaacacgattcaagcatatgtttgaagatcctgagatcatagcagctgccatccttctccctaaatttcggacctcttggacaaatgatgaaaccatcataaaacgaggtaaatgaatgcaagcaacatacacttgacgaattctaatctgggcaacctttgagccataccaaaattattcttttatttatttatttttgcactttttaggaatgttatatcccatctttggctgtgatctcaatatgaatattgatgtaaagtattcttgcagcaggttgtagttatccctcagtgtttcttgaaaccaaactcatatgtatcatatgtggtttggaaatgcagttagattttatgctaaaataagggatttgcatgattttagatgtagatgactgcacgtaaatgtagttaatgacaaaatccataaaatttgttcccagtcagaagcccctcaaccaaacttttctttgtgtctgctcactgtgcttgtaggcatggactacatcagagtgcatctggagcctttggaccacaagaaggaattggccaacagttcatctgatgatgaagattttttcgcttctttgaaaccgacaacacatgaagccagcaaagagttggatggatatctggcctgtgtttcagacaccagggagtctctgctcacgtttcctgctatttgcagcctctctatcaagactaatacacctcttcccgcatcggctgcctgtgagaggcttttcagcactgcaggattgcttttcagccccaaaagagctaggcttgacactaacaattttgagaatcagcttctactgaagttaaatctgaggttttacaactttgagtagcgtgtactggcattagattgtctgtcttatagtttgataattaaatacaaacagttctaaagcaggataaaaccttgtatgcatttcatttaatgttttttgagattaaaagcttaaacaagaatctctagttttctttcttgcttttacttttacttccttaatactcaagtacaattttaatggagtacttttttacttttactcaagtaagattctagccagatacttttacttttaattgagtaaaattttccctaagtacttgtactttcacttgagtaaaatttttgagtactttttacacctctg

SEQ ID NO: 18063 - protein, 336 aa, Artificial Sequence
  Synthetic Sequence
MALPVTALLLPLALLLHAARPMLPAPKNLVVSRVTEDSARLSWDIDEQRDWFESFLIQYQESEKVGEAIVLTVPGSERSYDLTGLKPGTEYTVSIYGVYHVYRSNPLSAIFTTTTTPAPRPPTPAPTIASQPLSLRPEACRPAAGGAVHTRGLDFACDIYIWAPLAGTCGVLLLSLVITLYCKRGRKKLLYIFKQPFMRPVQTTQEEDGCSCRFPEEEEGGCELRVKFSRSADAPAYKQGQNQLYNELNLGRREEYDVLDKRRGRDPEMGGKPRRKNPQEGLYNELQKDKMAEAYSEIGMKGERRRGKGHDGLYQGLSTATKDTYDALHMQALPPR

SEQ ID NO: 18064 - DNA, 63 bp, Artificial Sequence
  Synthetic Sequence
atggcactgcctgtgacagccctgctgctgcctctggccctgctgctgcacgcagcacggccc

SEQ ID NO: 18065 - DNA, 135 bp, Artificial Sequence
  Synthetic Sequence
accacaacccctgcccccagacctcccacacccgcccctaccatcgcgagccagccactgtccctgcggcctgaggcctgccggcccgccgccggcggagcagtgcacacacggggcctggactttgcctgtgac

SEQ ID NO: 18066 - DNA, 72 bp, Artificial Sequence
  Synthetic Sequence
atctacatatgggcaccactggcaggaacctgcggcgtgctgctgctgagcctggtcatcaccctgtactgt

SEQ ID NO: 18067 - DNA, 126 bp, Artificial Sequence
  Synthetic Sequence
aagagaggcaggaagaagctgctgtatatcttcaagcagcccttcatgagacccgtgcagaccacacaggaggaggacggctgctcttgtaggttcccagaggaggaggagggaggatgcgagctg

SEQ ID NO: 18068 - DNA, 336 bp, Artificial Sequence
  Synthetic Sequence
cgcgtgaagtttagccggtccgccgatgcacctgcatacaagcagggacagaaccagctgtataacgagctgaatctgggccggagagaggagtacgacgtgctggataagaggcggggccgggaccccgagatgggaggcaagcctcggagaaagaacccacaggagggcctgtacaatgagctgcaaaaggacaagatggccgaggcctattctgagatcggcatgaagggagagaggcgccggggcaagggacacgatggcctgtaccagggcctgagcaccgccacaaaggacacctatgatgccctgcacatgcaggccctgccccctaga

SEQ ID NO: 18069 - DNA, 1008 bp, Artificial Sequence
  Synthetic Sequence
ctggcactgcctgtgacagccctgctgctgcctctggccctgctgctgcacgcagcacggcccatgctgcctgcaccaaagaacctggtggtgtctcgggtgaccgaggactctgccagactgagctgggacatcgatgagcagagggattggttcgagagctttctgatccagtatcaggagtccgagaaagtgggcgaggccatcgtgctgacagtgcctggcagcgagcggtcctatgacctgaccggcctgaagccaggcacagagtacaccgtgtccatctacggcgtgtatcacgtgtacaggtccaatcctctgtctgccatcttcaccacaaccacaacccctgcccccagacctcccacacccgcccctaccatcgcgagccagccactgtccctgcggcctgaggcctgccggcccgccgccggcggagcagtgcacacacggggcctggactttgcctgtgacatctacatatgggcaccactggcaggaacctgcggcgtgctgctgctgagcctggtcatcaccctgtactgtaagagaggcaggaagaagctgctgtatatcttcaagcagcccttcatgagacccgtgcagaccacacaggaggaggacggctgctcttgtaggttcccagaggaggaggagggaggatgcgagctgcgcgtgaagtttagccggtccgccgatgcacctgcatacaagcagggacagaaccagctgtataacgagctgaatctgggccggagagaggagtacgacgtgctggataagaggcggggccgggaccccgagatgggaggcaagcctcggagaaagaacccacaggagggcctgtacaatgagctgcaaaaggacaagatggccgaggcctattctgagatcggcatgaagggagagaggcgccggggcaagggacacgatggcctgtaccagggcctgagcaccgccacaaaggacacctatgatgccctgcacatgcaggccctgccccctaga

SEQ ID NO: 18070 - protein, 336 aa, Artificial Sequence
  Synthetic Sequence
LALPVTALLLPLALLLHAARPMLPAPKNLVVSRVTEDSARLSWAIDEQRDWFESFLIQYQESEKVGEAIVLTVPGSERSYDLTGLKPGTEYTVSIYGVYHVYRSNPLSAIFTTTTTPAPRPPTPAPTIASQPLSLRPEACRPAAGGAVHTRGLDFACDIYIWAPLAGTCGVLLLSLVITLYCKRGRKKLLYIFKQPFMRPVQTTQEEDGCSCRFPEEEEGGCELRVKFSRSADAPAYKQGQNQLYNELNLGRREEYDVLDKRRGRDPEMGGKPRRKNPQEGLYNELQKDKMAEAYSEIGMKGERRRGKGHDGLYQGLSTATKDTYDALHMQALPPR

SEQ ID NO: 18071 - DNA, 1008 bp, Artificial Sequence
  Synthetic Sequence
ctggcactgcctgtgacagccctgctgctgcctctggccctgctgctgcacgcagcacggcccatgctgcctgcaccaaagaacctggtggtgtctcgggtgaccgaggactctgccagactgagctgggccatcgacgagcagagggattggttcgagagctttctgatccagtatcaggagtccgagaaagtgggcgaggccatcgtgctgacagtgcctggcagcgagcggtcctatgatctgaccggcctgaagccaggcacagagtacaccgtgtccatctacggcgtgtatcacgtgtacaggtccaatcctctgtctgccatcttcaccacaaccacaacccctgcccccagacctcccacacccgcccctaccatcgcgagccagccactgtccctgcggcctgaggcctgccggcccgccgccggcggagcagtgcacacacggggcctggactttgcctgtgacatctacatatgggcaccactggcaggaacctgcggcgtgctgctgctgagcctggtcatcaccctgtactgtaagagaggcaggaagaagctgctgtatatcttcaagcagcccttcatgagacccgtgcagaccacacaggaggaggacggctgctcttgtaggttcccagaggaggaggagggaggatgcgagctgcgcgtgaagtttagccggtccgccgatgcacctgcatacaagcagggacagaaccagctgtataacgagctgaatctgggccggagagaggagtacgacgtgctggataagaggcggggccgggaccccgagatgggaggcaagcctcggagaaagaacccacaggagggcctgtacaatgagctgcaaaaggacaagatggccgaggcctattctgagatcggcatgaagggagagaggcgccggggcaagggacacgatggcctgtaccagggcctgagcaccgccacaaaggacacctatgatgccctgcacatgcaggccctgccccctaga
